(19) United States
(12) Patent Application Publication
(10) Pub. No.: US 2014/0179557 A1
(43) Pub. Date: Jun. 26, 2014

(54) MARKER SEQUENCES FOR DIAGNOSING PROSTATE CANCER, AND USE THEREOF

(71) Applicant: PROTAGEN AKTIENGESELLSCHAFT, DORTMUND (DE)

(72) Inventors: ANGELIKA LUEKING, BOCHUM (DE); AXEL KOWALD, BOCHUM (DE); HELMUT KLOCKER, INZING (AT)

(73) Assignee: PROTAGEN AKTIENGESELLSCHAFT, DORTUND (DE)

(21) Appl. No.: 14/188,425

(22) Filed: Feb. 24, 2014

Related U.S. Application Data
(63) Continuation of application No. 13/985,218.

(30) Foreign Application Priority Data
Feb. 13, 2011 (EP) 11154261.9

(51) Int. Cl. G01N 33/574

(52) U.S. Cl. CPC G01N 33/57434
USPC 506/9; 506/18

(57) ABSTRACT

The present invention relates to novel marker sequences for prostate carcinoma while excluding inflammatory prostate diseases or diabetes or polymorbidity and relates to their diagnostic use including a method for screening potential active substances for such prostate diseases by means of these marker sequences. The invention furthermore relates to a diagnostic device including such marker sequences for prostate carcinoma, in particular a protein biochip and its use.

### RELATED APPLICATIONS

[0001] This application is a continuation application of application Ser. No. 13/985,218 filed Aug. 13, 2013, which is a national stage application (under 35 U.S.C. §371) of PCT/EP2012/052438, filed Feb. 13, 2012, which claims priority to European Application No. 11154261.9, filed Feb. 13, 2011. The entire contents of each of these applications are hereby incorporated by reference herein in their entirety.

### SUBMISSION OF SEQUENCE LISTING

[0002] The Sequence Listing associated with this application is filed in electronic format via EFS-Web and hereby incorporated by reference into the specification in its entirety. The name of the text file containing the Sequence Listing is US_Sequence_Listing. The size of the text file is 2,096 KB, and the text file was created on Feb. 24, 2014.

### DESCRIPTION

[0003] The present invention relates to novel marker sequences for prostate carcinoma (syn.: prostate cancer) while excluding inflammatory prostate diseases, diabetes, and polymorbidity, and relates to the diagnostic use thereof together with a method for screening potential active substances for prostate diseases of this type by means of these marker sequences. Furthermore, the method relates to a diagnostic device containing marker sequences of this type for prostate carcinoma, in particular a protein biochip and the use thereof.

[0004] Protein biochips are gaining increasing industrial importance in analysis and diagnosis as well as in pharmaceutical development. Protein biochips have become established as screening instruments.

[0005] The rapid and highly parallel detection of a multiplicity of specifically binding analysis molecules in a single experiment is rendered possible hereby. To produce protein biochips, it is necessary to have the required proteins available. For this purpose, in particular protein expression libraries have become established. The high throughput cloning of defined open reading frames is one possibility (Heyman, J. A., Cornthwaite, J., Foncerrada, L., Gilmore, J. R., Gontang, E., Hartman, K. J., Hernandez, C. L., Hood, R., Hull, H. M., Lee, W. Y., Marcil, R., Marsh, E. J., Mudd, K. M., Patino, M. J., Purcell, T. J., Rowland, J. J., Sindici, M. L. and Hoeffler, J. P., (1999) Genome-scale cloning and expression of individual open reading frames using topoisomerase I-mediated ligation. Genome Res, 9, 383-392; Kersten, B., Feilner, T., Kramer, A., Wehrmeyer, S., Possling, A., Witt, I., Zanor, M. I., Stracke, R., Lueking, A., Kreutzberger, J., Lehrach, H. and Cahill, D. J. (2003) Generation of Arabidopsis protein chip for antibody and serum screening. Plant Molecular Biology, 52, 999-1010; Reboul, J., Reboul, J., Vaglio, P., Rual, J. F., Lamesch, P., Martinez, M., Armstrong, C M., Li, S., Jacotot, L., Bertin, N., Janky, R., Moore, T., Hudson, J. R., Jr., Hartley, J. L., Brasch, M. A., Vandenhaute, J., Boulton, S., Endress, G. A., Jenna, S., Chevet, E., Papasotiropoulos, V., Tolias, P. P., Ptacek, J., Snyder, M., Huang, R., Chance, M. R., Lee, H., Doucette-Stamm, L., Hill, D. E. and Vidal, M. (2003) C. elegans ORFeome Version 1.1: experimental verification of the genome annotation and resource for proteome-scale protein expression. Nat Genet, 34, 35-41.; Walhout, A. J., Temple, G. F., Brasch, M. A., Hartley, J. L., Lorson, M. A., van den Heuvel, S. and Vidal, M. (2000) GATEWAY recombinational cloning: application to the cloning of large numbers of open reading frames or ORFeomes. Methods Enzymol, 328, 575-592). However, an approach of this type is strongly connected to the progress of the genome sequencing projects and the annotation of these gene sequences. Furthermore, the determination of the expressed sequence can be ambiguous due to differential splicing processes. This problem may be circumvented by the application of cDNA expression libraries (Bussow, K., Cahill, D., Nietfeld, W., Bancroft, D., Scherzinger, E., Lehrach, H. and Walter, G. (1998) A method for global protein expression and antibody screening on high-density filters of an arrayed cDNA library. Nucleic Acids Research, 26, 5007-5008; Büssow, K., Nordhoff, E., Lübbert, C, Lehrach, H. and Walter, G. (2000) A human cDNA library for high-throughput protein expression screening. Genomics, 65, 1-8; Holz, C, Lueking, A., Bovekamp, L., Gutjahr, C, Bolotina, N., Lehrach, H. and Cahill, D. J. (2001) A human cDNA expression library in yeast enriched for open reading frames. Genome Res, 11, 1730-1735; Lueking, A., Holz, C, Gotthold, C, Lehrach, H. and Cahill, D. (2000) A system for dual protein expression in Pichia pastoris and Escherichia coli, Protein Expr. Purif., 20, 372-378). The cDNA of a particular tissue is hereby cloned into a bacterial or an eukaryotic expression vector, such as, e.g., yeast. The vectors used for the expression are generally characterized in that they carry inducible promoters that may be used to control the time of protein expression. Furthermore, expression vectors have sequences for so-called affinity epitopes or affinity proteins, which on the one hand permit the specific detection of the recombinant fusion proteins by means of an antibody directed against the affinity epitope, and on the other hand the specific purification via affinity chromatography (IMAC) is rendered possible.

[0006] For example, the gene products of a cDNA expression library from human fetal brain tissue in the bacterial expression system Escherichia coli were arranged in high-density format on a membrane and could be successfully screened with different antibodies. It was possible to show that the proportion of full-length proteins is at least 66%. Additionally, the recombinant proteins from the library could be expressed and purified in a high-throughput manner (Braun P., Hu, Y., Shen, B., Halleck, A., Koundinya, M., Harlow, E. and LaBaer, J. (2002) Proteome-scale purification of human proteins from bacteria. Proc Natl Acad Sci USA, 99, 2654-2659; Büssow (2000) supra; Lueking, A., Horn, M., Eickhoff, H., Büssow, K., Lehrach, H. and Walter, G. (1999) Protein microarrays for gene expression and antibody screening. Analytical Biochemistry, 270, 103-111). Protein biochips of this type based on cDNA expression libraries are in particular the subject matter of WO 99/57311 and WO 99/57312.

[0007] Furthermore, in addition to antigen-presenting protein biochips, antibody-presenting arrangements are likewise described (Lal et al (2002) Antibody arrays: An embryonic but rapidly growing technology, DDT, 7, 143-149; Kusnezow et al. (2003), Antibody microarrays: An evaluation of production parameters, Proteomics, 3, 254-264).

[0008] However, there is a great need to provide indication-specific diagnostic devices, such as a protein biochip.

[0009] The laboratory parameters for the diagnosis of prostate carcinoma include acid phosphatase (AP) and prostate-specific antigen (PSA). Above all, PSA currently has a high importance in diagnostics. It is specific for the prostate, but not for a tumor disease, but rather can also be elevated in the event of inflammation, benign prostate hyperplasia, urine retention, or without an obvious reason. A value over 4 ng/mL already requires clarification.

[0010] Applicant's WO2010/000874 already describes the diagnosis of prostate carcinoma and prostate inflammations by means of a protein biochip and provides certain diagnostic marker sequences.

[0011] However, it is a disadvantage that these markers are also suitable for the diagnosis of prostate inflammation so that it is not possible to discriminate within the patient group of prostate cancer patients with these marker sequences that are known in the prior art. It is furthermore a drawback of the prior art that false-positive marker sequences may be identified based on other indications such as prostate inflammation and diabetes.

[0012] WO 2009/080017 discloses marker sequences for neurodegenerative diseases and the use thereof. The sequences disclosed in WO 2009/080017 were obtained accordingly using a method without the use of samples from prostate cancer patients.

[0013] US 2004/259086 relates to compositions, kits, and methods for detecting, characterizing, preventing, and treating human prostate cancers. A variety of marker sequences were used whose levels of expression correlate to prostate cancer. however, US 2004/259086 does not disclose any marker sequences for the diagnosis of prostate carcinoma while excluding inflammatory prostate diseases, diabetes, and polymorbidity. The marker sequences in US 2004/259086 were obtained using subtraction of cDNA libraries produced from the mRNA of patients with benign prostatic hyperplasia and the cDNA produced from the mRNA of patients with prostate cancer ([0339] ff. in US 2004/259086). There was no further validation. These marker sequences are thus not suitable for identifying patient subgroups within the group of prostate cancer patients.

[0014] DNA sample arrays HG-U95, HG-U133 and HG-U133 (Affymetrix) disclose the SEQ ID Nos. 1 and 247 already used in the present application. DNA sample arrays HG-U95, HG-U133 and HG-U133 were not validated for specific diagnostic uses, however.

[0015] The object of the present invention is to provide improved marker sequences and the diagnostic use thereof for the treatment of prostate carcinoma, resulting in particular in discrimination or exclusion of prostate inflammation and/or diabetes.

[0016] The provision of specific marker sequences permits a reliable diagnosis and stratification of patients with prostate carcinoma, in particular by means of a protein biochip.

[0017] The invention therefore also relates to the use of marker sequences for the diagnosis of prostate cancer, wherein at least one marker sequence of a cDNA selected from the group SEQ 1-246 or respectively a protein coded thereby or respectively a partial sequence or fragment thereof (hereinafter: marker sequences according to the invention) is determined on or from a patient to be examined.

[0018] It was possible to identify the marker sequences according to the invention by means of differential screening of samples from healthy test subjects with patient samples with prostate carcinoma on a protein biochip. For delimiting and discriminating inflammatory prostate disease(s) and/or diabetes, the marker sequences according to the invention are cross-checked with patient samples from inflammatory prostate diseases (e.g. all forms of prostatic hyperplasia, prostatitis) and diabetes on a protein chip. In doing so, it was possible to exclude one or a more different inflammatory prostate diseases and forms of diabetes. Only those marker sequences according to the invention that were not also simultaneously identified as marker sequences for inflammatory prostate diseases or diabetes continue to be considered as marker sequences for prostate carcinoma.

[0019] This process also advantageously permits the exclusion of comorbidity or polymorbidity, e.g. the presence of inflammatory prostate diseases or diabetes. On the other hand, false-positive marker sequences are excluded during the course of this process.

[0020] For the first time, these marker sequences according to the invention could be identified with sensitivity by means of protein biochips (see examples) hereby.

[0021] Thus for the first time the present invention provides marker sequences with which a special patient group may be determined within the group of prostate cancer patients (hereinafter “sub-group”). The sub-group, i.e. the patients within the group of patients with prostate cancer who do not have diabetes and/or inflammatory prostate disease, may be selectively identified (diagnosed) with these marker sequences. Thus in the scope of individualized medicine, it is possible to find patient sub-groups within the group of prostate cancer patients and select the suitable treatment/therapy for this sub-group, while patients with prostate cancer who are not in this sub-group are excluded from unsuitable therapies.

[0022] The subject matter of the invention is therefore a use of the marker sequences for identifying a sub-group of patients with prostate cancer, wherein the sub-group does not have any inflammatory prostate disease(s) and/or does not have diabetes, and wherein at least one marker sequence of a cDNA is selected from the group SEQ 1-246 and/or SEQ 247-452 or respectively a protein coded thereby or respectively a partial sequence or fragment thereof is determined on or from a patient to be examined.

[0023] The subject matter of the invention is therefore also the use of the marker sequences for the diagnosis of prostate carcinoma while excluding inflammatory prostate disease(s) or diabetes or polymorbidity, wherein at least one marker sequence of a cDNA is selected from the group SEQ 1-246 and/or SEQ 247-452 or respectively a protein coded thereby or respectively a partial sequence or fragment thereof on or from a patient to be examined, and wherein the marker sequence(s) was/were identified with a process, including:
[0024] a) Identification of marker sequence candidates using differential screening with protein biochips, for instance two protein biochips, from respectively a cDNA expression bank of a patient who has prostate cancer and a subject who does not have prostate cancer,
[0025] b) Validation of the marker sequence candidates by means of samples from patients who have inflammatory prostate disease(s) and/or samples from patients who have diabetes.

[0026] The samples used for validation come from patients who have one or more inflammatory prostate diseases and/or diabetes, but who do not have prostate cancer.

[0027] One embodiment of the invention relates to the use of the inventive marker sequences for the diagnosis of prostate carcinoma while excluding inflammatory prostate diseases or diabetes or polymorbidity, wherein 2 or 3, preferably 4 or 5, particularly preferably 6, 7 or 8 or more different marker sequences, for instance 10 to 20 or 30 or more different marker sequences, are determined on or from a patient to be examined.

[0028] One embodiment of the invention relates to the use of the inventive marker sequence(s) for the diagnosis of prostate carcinoma while excluding inflammatory prostate diseases or diabetes or polymorbidity, wherein at least one of the marker sequences is selected from the group SEQ ID No. 247, SEQ ID No. 250, SEQ ID No. 290 or a protein coded by SEQ ID No. 247, SEQ ID No. 250, SEQ ID No. 290 or from a partial sequence or fragment of SEQ ID No. 247, SEQ ID No. 250, SEQ ID No. 290. Furthermore preferred are therefore the corresponding marker sequences selected from the group SEQ ID No. 1, SEQ ID No. 4 and SEQ ID No. 44. or a protein coded by SEQ ID No. 1, SEQ ID No. 4, SEQ ID No. 44 or from a partial sequence or fragment of SEQ ID No. 1, SEQ ID No. 4, SEQ ID No. 44.

[0029] Furthermore preferred are the inventive marker sequences SEQ ID No. 249, SEQ ID No. 255, SEQ ID No. 271, SEQ ID No. 301, SEQ ID No. 341, wherein at least one of the marker sequences is selected from the group SEQ ID No. 249, SEQ ID No. 255, SEQ ID No. 271, SEQ ID No. 301, SEQ ID No. 341 or a protein coded by SEQ ID No. 249, SEQ ID No. 255, SEQ ID No. 271, SEQ ID No. 301, SEQ ID No. 341 or from a partial sequence or fragment of SEQ ID No. SEQ ID No. 249, SEQ ID No. 255, SEQ ID No. 271, SEQ ID No. 301, SEQ ID No. 341. Furthermore preferred are therefore the corresponding marker sequences selected from the group SEQ ID No. 3, SEQ ID No. 9, SEQ ID No. 25, SEQ ID No. 55, SEQ ID No. 95 or a protein coded by SEQ ID No. 3, SEQ ID No. 9, SEQ ID No. 25, SEQ ID No. 55, SEQ ID No. 95 or from a partial sequence or fragment of SEQ ID No. 3, SEQ ID No. 9, SEQ ID No. 25, SEQ ID No. 55, SEQ ID No. 95.

[0030] One embodiment of the invention relates to the use of the inventive marker sequence(s) for the diagnosis of prostate carcinoma while excluding inflammatory prostate diseases or diabetes or polymorbidity, wherein at least one marker sequence of a protein is selected from the group of neuro-oncological ventral antigen 2 (NOVA2), syntaxin 18 (STX18), heat shock 105 kDa/110 kDa protein 1 (HSPH1) or a nucleic acid coding therefor or a partial sequence or fragment thereof is determined on or from a patient to be examined and wherein the marker sequence(s) was/were identified with a method including the steps
[0031] a) Identification of marker sequence candidates using differential screening with protein biochips, for instance two protein biochips, from respectively a cDNA expression bank of a patient who has prostate cancer and a subject who does not have prostate cancer,
[0032] b) Validation of the marker sequence candidates by means of samples from patients who have inflammatory prostate disease(s) and/or samples from patients who have diabetes.

[0033] Another embodiment of the invention relates to the use of the inventive marker sequence(s) for the diagnosis of prostate carcinoma while excluding inflammatory prostate diseases or diabetes or polymorbidity in accordance with any of the foregoing claims, characterized in that the determination is made by means of in vitro diagnosis.

[0034] Another embodiment of the invention relates to the use of at least one marker sequence of a cDNA respectively selected from the group SEQ 1-246 and/or SEQ 247-452 or respectively a protein coded thereby or respectively from a partial sequence or fragment thereof as a diagnostic agent, wherein the marker sequence(s) was/were identified with a method including the steps
[0035] a) Identification of marker sequence candidates using differential screening with protein biochips, for instance two protein biochips, from respectively a cDNA expression bank of a patient who has prostate cancer and a subject who does not have prostate cancer,
[0036] b) Validation of the marker sequence candidates by means of samples from patients who have inflammatory prostate disease(s) and/or samples from patients who have diabetes.

[0037] The subject matter of the invention is also a method for the diagnosis of prostate carcinoma while excluding inflammatory prostate diseases or diabetes or polymorbidity, wherein

a.) at least one marker sequence of a cDNA selected from the group SEQ 1-246 and/or SEQ 247-452 or respectively a protein coded thereby or respectively from a partial sequence or fragment thereof is/are applied to a solid support and
b.) is/are brought into contact with body fluid or tissue extract of a patient and
c.) the detection of and interaction of the body fluid or tissue extract with the marker sequence(s) from a.) is carried out.

[0038] The subject matter of the invention is also a method for the stratification, in particular risk stratification, or for therapy control of a patient with prostate carcinoma, while excluding inflammatory prostate diseases or diabetes or polymorbidity, wherein at least one marker sequence of a cDNA selected from the group SEQ 1-246 and/or SEQ 247-452 or respectively a protein coded thereby or respectively a from partial sequence or fragment thereof is determined on or from a patient to be examined and wherein the marker sequence(s) was/were identified with a method including the steps
[0039] a) Identification of marker sequence candidates using differential screening with protein biochips, for instance two protein biochips, from respectively a cDNA expression bank of a patient who has prostate cancer and a subject who does not have prostate cancer,
[0040] b) Validation of the marker sequence candidates by means of samples from patients who have inflammatory prostate disease(s) and/or samples from patients who have diabetes.

[0041] The subject matter of the invention is also an assay, protein biochip comprising an arrangement containing at least one marker sequence of a cDNA respectively selected from the group SEQ 1-246 and/or SEQ 247-452 or respectively a protein coded thereby or respectively from a partial sequence or fragment thereof, characterized in that the marker sequence(s) is/are applied to a solid support and wherein the marker sequence(s) was/were identified with a method including the steps
[0042] a) Identification of marker sequence candidates using differential screening with protein biochips, for instance two protein biochips, from respectively a cDNA expression bank of a patient who has prostate cancer and a subject who does not have prostate cancer,
[0043] b) Validation of the marker sequence candidates by means of samples from patients who have inflammatory prostate disease(s) and/or samples from patients who have diabetes.

[0044] The subject matter of the invention is also diagnostic agents for the diagnosis of prostate carcinoma while excluding inflammatory prostate diseases or diabetes or polymorbidity containing at least one marker sequence respectively selected from the group SEQ 1-246 and/or SEQ 247-452 or respectively a protein coded thereby or respectively from a partial sequence or fragment thereof, wherein the marker sequence(s) was/were identified with a method including the steps
[0045] a) Identification of marker sequence candidates using differential screening with protein biochips, for instance two protein biochips, from respectively a cDNA expression bank of a patient who has prostate cancer and a subject who does not have prostate cancer,
[0046] b) Validation of the marker sequence candidates by means of samples from patients who have inflammatory prostate disease(s) and/or samples from patients who have diabetes.

[0047] The term “prostate carcinoma” includes only the indication prostate carcinoma or prostate cancer while excluding comorbidity or polymorbidity (definition e.g. according to Pschyrembel, de Gruyter, 261st edition (2007), Berlin). Any overlapping diseases of prostate inflammation or diabetes are strictly excluded in accordance with the invention.

[0048] The term “inflammatory prostate diseases” includes all forms of prostatitis up to and including chronic forms of prostatic inflammation, including prostate hyperplasia, especially benign prostate hyperplasia. In accordance with the invention this includes the presence of one or a plurality of different inflammatory prostate diseases.

[0049] Within the scope of this invention, diabetes shall be construed to mean for instance “Diabetes mellitus,” especially Type II Diabetes mellitus (insulin resistant), a chronic metabolic disease in which insulin production is disrupted in the beta cells of the islets of Langerhans in the pancreas, or in which, although insulin is present, it is not able to have the correct action at its target location, the cell membranes. The result of this impaired insulin production or action is elevated blood sugar levels (hyperglycemia). When discussing diabetes, a distinction is made between pre-diabetes, in which “impaired glucose tolerance” is not chemically detectable in the laboratory until it has reached its final stage, and actually manifested Diabetes mellitus. There is insulin resistance at the beginning of the pre-diabetic phase. Endothelial dysfunction, hyperlipoproteinemia, and hypertensive circulatory dysfunction develop nearly simultaneously.

[0050] Within the scope of this invention, diabetes shall be understood to include Type I diabetes, as well.

[0051] The invention therefore relates to those marker sequences that exclude comorbidity or polymorbidity with other indications such as prostate inflammation(s) or diabetes (in all forms).

[0052] In a further embodiment at least 2 to 5 or 10, preferably 30 to 50 marker sequences, or 50 to 100 or more marker sequences are determined on or from a patient to be examined.

[0053] In a further embodiment of the invention, the marker sequences according to the invention can likewise be combined, supplemented, or expanded with known biomarkers for this indication. Particularly preferred are likewise such markers as are disclosed in WO2010/000874.

[0054] In a preferred embodiment, the determination of the marker sequences is carried out outside the human body and the determination is carried out in an ex vivo/in vitro diagnosis.

[0055] In a further embodiment of the invention, the invention relates to the use of marker sequences as diagnostic agents, wherein at least one marker sequence of a cDNA is selected from the group SEQ 1-246 or respectively a protein coding therefor or respectively from a partial sequence or fragment thereof.

[0056] Furthermore, the invention relates to a method for the diagnosis of prostate carcinoma, wherein a.) at least one marker sequence of a cDNA selected from the group SEQ 1-246 or respectively a protein coding therefor or respectively from a partial sequence or fragment thereof is applied to a solid support and b.) is brought into contact with body fluid or tissue extract of a patient and c.) the detection of an interaction of the body fluid or tissue extract with the marker sequences from a.) is carried out.

[0057] The invention therefore likewise relates to diagnostic agents for the diagnosis of prostate carcinoma respectively selected from the group SEQ 1-246 or respectively a protein coding therefor or respectively from a partial sequence or fragment thereof.

[0058] In one particularly preferred embodiment, the marker sequences SEQ 1-18 are particularly preferred and SEQ 19-56 are preferred, wherein again lower numeric values are respectively preferred.

[0059] The detection of an interaction of this type can be carried out, for example, by a probe, in particular by an antibody.

[0060] The invention therefore likewise relates to the object of providing a diagnostic device or an assay, in particular a protein biochip, which permits a diagnosis or examination for prostate carcinoma.

[0061] Furthermore, the invention relates to a method for the stratification, in particular risk stratification and/or therapy control of a patient with a prostate carcinoma, wherein at least one marker sequence of a cDNA selected from the group SEQ 1-246 or respectively a protein coding therefor is determined on a patient to be examined.

[0062] Furthermore, the stratification of the patients with prostate carcinoma in new or established subgroups of prostate carcinoma is also covered, as well as the expedient selection of patient groups for the clinical development of novel therapeutic agents. The term therapy control likewise covers the allocation of patients to responders and non-responders regarding a therapy or the therapy course thereof.

[0063] “Diagnosis” for the purposes of this invention means the positive determination of a prostate carcinoma by means of the marker sequences according to the invention as well as the assignment of the patients to a prostate carcinoma. The term diagnosis covers medical diagnostics and examinations in this regard, in particular in vitro diagnostics and laboratory diagnostics, likewise proteomics and nucleic acid blotting. Further tests can be necessary to be sure and to exclude other diseases. The term diagnosis therefore likewise covers the differential diagnosis of prostate carcinoma by means of the marker sequences according to the invention and the prognosis of a prostate carcinoma.

[0064] “Stratification or therapy control” for the purposes of this invention means that the method according to the invention renders possible decisions for the treatment and therapy of the patient, whether it is the hospitalization of the patient, the use, effect and/or dosage of one or more drugs, a therapeutic measure or the monitoring of a course of the disease and the course of therapy or etiology or classification of a disease, e.g., into a new or existing subtype or the differentiation of diseases and the patients thereof.

[0065] In a further embodiment of the invention, the term “stratification” covers in particular the risk stratification with the prognosis of an outcome of a negative health event.

[0066] Within the scope of this invention, “patient” means any test subject—human or mammal—with the proviso that the test subject is tested for prostate carcinoma.

[0067] The term “marker sequences” for the purposes of this invention means that the cDNA or the polypeptide or protein that can be respectively obtained therefrom are significant for prostate carcinoma. For example, the cDNA or the polypeptide or protein that can be respectively obtained therefrom can exhibit an interaction with a sample, e.g. substances from the body fluid or tissue extract of a patient with inflammatory prostate diseases, prostate carcinoma (e.g., antigen (epitope)/antibody (paratope) interaction). For the purposes of the invention “wherein at least one marker sequence of a cDNA selected from the group SEQ 1-246 or respectively a protein coding therefor or respectively from a partial sequence or fragment thereof on or from a patient to be examined is determined” means that an interaction between the body fluid or tissue extract of a patient and the marker sequences according to the invention is detected. An interaction of this type is, e.g., a bond, in particular a binding substance on at least one marker sequence according to the invention or in the case of a cDNA the hybridization with a suitable substance under selected conditions, in particular stringent conditions (e.g., such as usually defined in J. Sambrook, E. F. Fritsch, T. Maniatis (1989), Molecular cloning: A laboratory manual, 2nd Edition, Cold Spring Harbor Laboratory Press, Cold Spring Harbor, USA or Ausubel, “Current Protocols in Molecular Biology,” Green Publishing Associates and Wiley Interscience, N. Y. (1989)). One example of stringent hybridization conditions is: hybridization in 4×SSC at 65° C. (alternatively in 50% formamide and 4×SSC at 42° C.), followed by several washing steps in 0.1×SSC at 65° C. for a total of approximately one hour. An example of less stringent hybridization conditions is hybridization in 4×SSC at 37° C., followed by several washing steps in 1×SSC at room temperature.

[0068] According to the invention, substances of this type are constituents of a body fluid, in particular blood, whole blood, blood plasma, blood serum, patient serum, urine, cerebrospinal fluid, synovial fluid, or of a tissue extract of the patient.

[0069] “Samples” from patients or subjects contain for instance body fluid, especially blood, whole blood, blood plasma, blood serum, patient serum, urine, cerebro-spinal fluid, synovial fluid, or a tissue extract from the patient or subject.

[0070] In a further embodiment of the invention, however, the marker sequences according to the invention can be present in a significantly higher or lower expression rate or concentration that indicates prostate carcinoma. The relative sick/healthy expression rates of the marker sequences for inflammatory prostate diseases, prostate carcinoma according to the invention are hereby determined by means of proteomics or nucleic acid blotting.

[0071] In a further embodiment of the invention, the marker sequences have a recognition signal that is addressed to the substance to be bound (e.g., antibody, nucleic acid). It is preferred according to the invention that for a protein the recognition signal is an epitope and/or a paratope and/or a hapten and for a cDNA is a hybridization or binding region.

[0072] The marker sequences according to the invention are the subject matter of Table A and can be clearly identified by the respectively cited database entry (also by means of the Internet: http://www.ncbi.nlm.nih.gov/) (see in Table A: accession no.).

[0073] The invention therefore also relates to the full-length sequences of the markers according to the invention, as defined in Table 1 via the known database entry according to Table A, referred to hereafter as SEQ 247-452; see also the associated sequence listing.

[0074] Therefore, the invention also comprises analogous embodiments of a SEQ 247-452 to the marker sequences SEQ 246, such as, e.g., described in the claims, since the SEQ 1-246 according to the invention in turn represent partial sequences, at least with high homology. The specific marker sequences SEQ 1-246 are preferred according to the invention, however.

[0075] Furthermore, SEQ 247-260 and SEQ 261-294 are preferred.

[0076] In a further embodiment of the invention, marker sequences are preferred that have P values less than or equal to 0.2, preferably less than or equal to 0.15, particularly preferably less than or equal to 0.1. In a first embodiment of the invention, the marker sequences SEQ ID No. 247, 250, 290, partial sequences, fragments, homologs or peptides/proteins coded thereby are preferred. These marker sequences have particularly suitable P values: SEQ ID No. 247 (P value: 0.1053), SEQ ID No. 250 (P value: 0.0310) and SEQ ID No. 290 (P value: 0.0254). The P value indicates the probability with which an alignment was found in the data base. See for instance http://www.ncbi.nlm.nih.gov/books/NBK62051/ for the definition of P value.

[0077] According to the invention, the marker sequences also cover those modifications of the cDNA sequence and the corresponding amino acid sequence as chemical modification, such as citrullination, acetylation, phosphorylation, glycosylation or poly(A) strand and other modifications known to one skilled in the art.

[0078] In a further embodiment of the invention, partial sequences or fragments of the marker sequences according to the invention are likewise comprised. In particular those partial sequences that have an identity of 99% or more, 98%, 97%, 96%, 95%, 94%, 93%, 92%, 91%, 90%, in particular 85%, 80% or 70% with the marker sequences according to the invention and are suitable for the inventive use—detecting prostate carcinoma while excluding inflammatory prostate diseases or diabetes or polymorbidity (so-called “homologs,” homolog marker sequences). Homologs may be protein or nucleic acid sequences.

[0079] Partial sequences are also sequences of the type which have 50 to 100 nucleotides, 70-120 nucleotides of a sequence of the SEQ 1-452, or peptides obtainable therefrom.

[0080] In a further embodiment, the respective marker sequence can be represented in different quantities in one more regions on a solid support. This permits a variation of the sensitivity. The regions can have respectively a totality of marker sequences, i.e., a sufficient number of different marker sequences, in particular 2 to 5 or 10 or more and optionally more nucleic acids and/or proteins, in particular biomarkers.

[0081] However, at least 96 to 25,000 (numerical) or more from different or identical marker sequences and further nucleic acids and/or proteins, in particular biomarkers are preferred. Furthermore preferred are more than 2,500, in particular preferred 10,000 or more different or identical marker sequences and optionally further nucleic acids and/or proteins, in particular biomarkers.

[0082] Another object of the invention relates to an arrangement of marker sequences containing at least one marker sequence of a cDNA selected from the group SEQ 1-452 or respectively a protein coding therefor. Preferably, the arrangement contains at least 2 to 5 or 10, preferably 30 to 50 marker sequences, or 50 to 100 or more marker sequences.

[0083] Within the scope of this invention, “arrangement” is synonymous with “array,” and if this “array” is used to identify substances on marker sequences, this is to be understood to be an “assay” or diagnostic device. In a preferred embodiment, the arrangement is designed such that the marker sequences represented on the arrangement are present in the form of a grid on a solid support. Furthermore, those arrangements are preferred that permit a high-density arrangement of protein binders and the marker sequences are spotted. Such high-density spotted arrangements are disclosed, for example, in WO 99/57311 and WO 99/57312 and can be used advantageously in a robot-supported automated high-throughput method.

[0084] Within the scope of this invention, however, the term “assay” or diagnostic device likewise comprises those embodiments of a device, such as ELISA, bead-based assay, line assay, Western Blot, immunochromatographic methods (e.g., so-called lateral flow immunoassays, or similar immunological single or multiplex detection measures. A protein biochip in terms of this invention is the systematic arrangement of proteins on a solid support.

[0085] The marker sequences of the arrangement are fixed on a solid support, but preferably spotted or immobilized even printed on, i.e. applied in a reproducible manner. One or more marker sequences can be present multiple times in the totality of all marker sequences and present in different quantities based on one spot. Furthermore, the marker sequences can be standardized on the solid support (i.e., by means of serial dilution series of, e.g., human globulins as internal calibrators for data normalization and quantitative evaluation).

[0086] The invention therefore relates to an assay or a protein biochip comprising an arrangement containing marker sequences according to the invention.

[0087] In a further embodiment, the marker sequences are present as clones. Clones of this type can be obtained, for example, by means of a cDNA expression library according to the invention (Büssow et al. 1998 (supra)). In a preferred embodiment, such expression libraries containing clones are obtained using expression vectors from a cDNA expression library comprising the cDNA marker sequences. These expression vectors preferably contain inducible promoters. The induction of the expression can be carried out, e.g., by means of an inductor, such as IPTG. Suitable expression vectors are described in Terpe et al. (Terpe T Appl Microbiol Biotechnol. 2003 January; 60(5): 523-33).

[0088] One skilled in the art is familiar with expression libraries, they can be produced according to standard works, such as Sambrook et al, “Molecular Cloning, A laboratory handbook, 2nd edition (1989), CSH press, Cold Spring Harbor, N.Y. Expression libraries are also preferred which are tissue-specific (e.g., human tissue, in particular human organs). Furthermore included according to the invention are expression libraries that can be obtained by exon-trapping. A synonym for expression library is expression bank.

[0089] Also preferred are protein biochips or corresponding expression libraries that do not exhibit any redundancy (so-called: Uniclone® library) and that may be produced, for example, according to the teachings of WO 99/57311 and WO 99/57312. These preferred Uniclone libraries have a high portion of non-defective fully expressed proteins of a cDNA expression library.

[0090] Within the context of this invention, the clones can also be, but not limited to, transformed bacteria, recombinant phages, or transformed cells from mammals, insects, fungi, yeasts, or plants.

[0091] The clones are fixed, spotted, or immobilized on a solid support.

[0092] The invention therefore relates to an arrangement wherein the marker sequences are present as clones.

[0093] Additionally, the marker sequences can be present in the respective form of a fusion protein, which contains, for example, at least one affinity epitope or tag. The tag may be one such as contains c-myc, his tag, arg tag, FLAG, alkaline phosphatase, VS tag, T7 tag or strep tag, HAT tag, NusA, S tag, SBP tag, thioredoxin, DsbA, a fusion protein, preferably a cellulose-binding domain, green fluorescent protein, maltose-binding protein, calmodulin-binding protein, glutathione S-transferase, or lacZ.

[0094] In all of the embodiments, the term “solid support” covers embodiments such as a filter, a membrane, a magnetic or fluorophore-labeled bead, a silica wafer, glass, metal, plastic, a chip, a target for mass spectrometry, or a matrix. However, a filter is preferred according to the invention.

[0095] As a filter, furthermore PVDF, nitrocellulose, or nylon is preferred (e.g., Immobilon P Millipore, Protran Whatman, Hybond N+ Amersham).

[0096] In another preferred embodiment of the arrangement according to the invention, the arrangement corresponds to a grid with the dimensions of a microtiter plate (8-12 wells strips, 96 wells, 384 wells, or more), a silica wafer, a chip, a target for mass spectrometry, or a matrix.

[0097] In a further embodiment, the invention relates to an assay or a protein biochip for identifying and characterizing a substance for prostate carcinoma, characterized in that an arrangement or assay according to the invention is a.) brought into contact with at least one substance to be tested and b.) a binding success is detected.

[0098] Furthermore, the invention relates to a method for identifying and characterizing a substance for prostate carcinoma, characterized in that an arrangement or assay according to the invention is a.) brought into contact with at least one substance to be tested and b.) a binding success is detected.

[0099] The substance to be tested can be any native or non-native biomolecule, a synthetic chemical molecule, a mixture, or a substance library.

[0100] After the substance to be tested contacts a marker sequence, the binding success is evaluated, which, for example, is carried out using commercially available image analyzing software (GenePix Pro (Axon Laboratories), Aida (Ray test), ScanArray (Packard Bioscience)).

[0101] The visualization of protein-protein interactions according to the invention (e.g., protein on marker sequence, as antigen/antibody) or corresponding “means for detecting the binding success” can be performed, for example, using fluorescence labeling, biotinylation, radioisotope labeling, or colloid gold or latex particle labeling in the usual way. A detection of bound antibodies is carried out with the aid of secondary antibodies, which are labeled with commercially available reporter molecules (e.g., Cy, Alexa, Dyomics, FITC, or similar fluorescent dyes, colloidal gold or latex particles), or with reporter enzymes, such as alkaline phosphatase, horseradish peroxidase, etc., and the corresponding colorimetric, fluorescent, or chemiluminescent substrates. Readout is conducted, e.g., using a microarray laser scanner, a CCD camera, or visually.

[0102] In a further embodiment, the invention relates to a drug/active substance or prodrug developed for prostate carcinoma and obtainable through the use of the assay or protein biochip according to the invention.

[0103] The invention therefore likewise relates to the use of an arrangement according to the invention or an assay for screening active substances for prostate carcinoma.

[0104] In a further embodiment, the invention therefore likewise relates to a target for the treatment and therapy of prostate carcinoma respectively selected from the group SEQ 1-246 or a protein respectively coding therefor.

[0105] In a further embodiment, the invention likewise relates to the use of the marker sequences according to the invention, preferably in the form of an arrangement, as an affinity material for carrying out an apheresis or in the broadest sense a blood lavage, wherein substances from body fluids of a patient with prostate carcinoma, such as blood or plasma, bind to the marker sequences according to the invention and consequently can be selectively withdrawn from the body fluid. Corresponding pertinent devices are known, such as e.g. chromatographic devices containing beads, balls, or chromatographic material, e.g. in a column, that have the inventive marker sequences and therefore can selectively withdraw e.g. (auto)antibodies.

### EXAMPLES AND FIGURES

[0106] Ten or more patient samples were individually screened against a cDNA expression library. The expression clones specific to prostate carcinoma were determined through a comparison with ten or more healthy samples. Further, the identified markers were cross-checked against samples from patients with inflammatory prostate disease or diabetes. False positive markers were removed. The subsequent identity of the remaining marker sequences was determined by DNA sequencing.

[0107] FIG. 1 shows the differential screening between two protein biochips from respectively one cDNA expression bank of a patient and a healthy test subject. The differential clones are detected by means of fluorescent labeling and evaluated by means of bioinformatics.

[0108] In the scope of the biomarker identification, various bioinformatic analyses are performed. For each serum, reactivities against approximately 2000 different antigens are measured by means of microarray. These data are used for a ranking of the spotted antigens with respect to their differentiation capability between healthy and diseased sera. This analysis is performed by means of the non-parameterized Mann-Whitney test on normalized intensity data. An internal standard which is also spotted on each chip is used for the normalization. Since a p value is calculated for each antigen, methods are used for correction of the multiple test. As a very conservative approach, a Bonferroni direction is performed and the less restrictive false discovery rate (FDR) according to Benjamini & Hochberg is additionally calculated.

[0109] Furthermore, the data are used for classification of the sera. Different multivariate methods are used hereby. These are methods from statistical learning methods such as support vector machines (SVM), neural networks, or classification trees, as well as a threshold value method, which is capable of both classification and also visual representation of the data.

[0110] To avoid overfitting, a 10-fold cross-validation of the data is performed.

TABLE A

| SEQ | gi | | DNA |
|---|---|---|---|
| ID | Accession | Name | Accession |
| 247 | gi\|5902723 | Neuro-oncological ventral antigen 2 (NOVA2) | NM_002516 |
| 248 | gi\|113411825 | Similar to Cyclin-L2 (Paneth cell-enhanced expression protein) | NM_030937 |
| | | transcript variant 1 (LOC727877) | |
| 249 | gi\|31543652 | Signal recognition particle 14 kDa (homologous Alu RNA binding | NM_003134 |
| | | protein) (SRP14) | |
| 250 | gi\|42544158 | Heat shock 105 kDa/110 kDa protein 1 (HSPH1) | NM_006644 |
| 251 | gi\|113428756 | Zinc finger protein 154 (pHZ-92) (ZNF154) | NM_001085384 |
| 252 | gi\|32490571 | Erythrocyte membrane protein band 4.1-like 3 (EPB41L3) | NM_012307 |
| 253 | gi\|77628146 | Endoplasmic reticulum protein 29 (ERP29) transcript variant 1 | NM_006817 |
| 254 | gi\|22749232 | Zinc finger protein 579 (ZNF579) | NM_152600 |
| 255 | gi\|194097404 | Peptide chain release factor 3 | NM_018094 |
| 256 | gi\|217330633 | Serine/Threonine kinase 36 | NM_015690 |
| 257 | gi\|16507207 | Capicua homolog (Drosophila) (CIC) | NM_015125 |
| 258 | gi\|32261293 | Protein kinase interferon-inducible double stranded RNA dependent | NM_003690 |
| | | activator (PRKRA) | |
| 259 | gi\|49574506 | Neugrin neurite outgrowth associated (NGRN) transcript variant 1 | NM_001033088 |
| 260 | gi\|89031690 | Chromosome 10 genomic contig, reference assembly | NM_005876 |
| 261 | gi\|113427652 | Alveolar soft part sarcoma chromosome region candidate 1 (ASPSCR1) | NM_024083 |
| 262 | gi\|40353201 | OTU domain containing 5 (OTUD5) | NM_017602 |
| 263 | gi\|66932901 | SREBP cleavage-activating protein (SCAP) | NM_012235 |
| 264 | gi\|33624820 | Septin 6 (SEPT6) transcript variant V | NM_145800 |
| 265 | gi\|40807365 | Dihydrouridine synthase 1-like (S. cerevisiae) (DUS1L) | NM_022156 |
| 266 | gi\|52851419 | Chromosome 6 open reading frame 153 (C6orf153) | NM_033112 |
| 267 | gi\|12597652 | 5′-nucleotidase domain containing 2 (NT5DC2) | NM_001134231 |
| 268 | gi\|113428394 | Plasticity-related gene 2 (PRG2) | XM_001129992 |
| 269 | gi\|40353728 | Ras and Rab interactor 3 (RIN3) | NM_024832 |
| 270 | gi\|55925649 | Transcription elongation factor A (SII)-like 2 (TCEAL2) | NM_080390 |
| 271 | gi\|34147459 | Coiled-coil domain containing 102A (CCDC102A) | NM_033212 |
| 272 | gi\|63003893 | Hypothetical protein LOC154467 Chromosome 6 open reading frame | NM_138493 |
| | | 129 (C6orf129) | |
| 273 | gi\|22538469 | Eomesodermin homolog (Xenopus laevis) (EOMES) | NM_005442 |
| 274 | gi\|34222261 | Tubulin, beta (TUBB) | NM_000972 |
| 275 | gi\|56676308 | Peptidylprolyl cis/trans isomerase NIMA-interacting 1 (PIN1) | NM_006221 |
| 276 | gi\|7669552 | Valosin-containing protein (VCP) | NM_007126 |
| 277 | gi\|34335231 | Creatine kinase brain (CKB) | NM_001823 |
| 278 | gi\|62414288 | Vimentin (VIM) | NM_003380 |
| 279 | gi\|71772259 | Ribosomal protein L5 (RPL5) | NM_000969 |
| 280 | gi\|223718111 | Solute carrier family 25 (mitochondrial carrier; phosphate carrier), | NM_213611 |
| | | member 3 (SLC25A3), nuclear gene encoding mitochondrial protein, | |
| | | transcript variant 3 | |
| 281 | gi\|33636763 | Ankyrin repeat domain 13B (ANKRD13B) | NM_152345 |
| 282 | gi\|38372936 | Chromatin modifying protein 2A (CHMP2A) transcript variant 1 | NM_014453 |
| 283 | gi\|134152707 | Arginine and glutamate rich 1 | NM_018011 |
| 284 | gi\|37577133 | Ubiquitin-conjugating enzyme E2M (UBC12 homolog yeast) (UBE2M) | NM_003968 |
| 285 | gi\|55925607 | Kelch-like 21 (Drosophila) (KLHL21) | NM_014851 |
| 286 | gi\|92859637 | Synaptotagmin V (SYT5) | NM_003180 |
| 287 | gi\|83776595 | CaM kinase-like vesicle-associated (CAMKV) | NM_024046 |
| 288 | gi\|14042969 | Integrin alpha FG-GAP repeat containing 3 (ITFG3) | NM_032039 |
| 289 | gi\|23111001 | V-maf musculoaponeurotic fibrosarcoma oncogene homolog F (avian) | NM_012323 |
| | | (MAFF) transcript variant 1 | |
| 290 | gi\|39725935 | Syntaxin 18 (STX18) | NM_016930 |
| 291 | gi\|194018519 | G1 to S phase transition 1 isoform 1 | NM_002094 |
| 292 | gi\|34147576 | RaP2 interacting protein 8 (RPIP8) | NM_001144825 |
| 293 | gi\|12597634 | B-cell CLL/lymphoma 11B (zinc finger protein) (BCL11B) transcript | NM_022898 |
| | | variant 2 | |
| 294 | gi\|22212941 | Ubiquitin associated protein 1 (UBAP1) | NM_016525 |
| 295 | gi\|38016910 | Stomatin (STOM) transcript variant 1 | NM_004099 |
| 296 | gi\|66879658 | ADP-ribosylation factor 1 (ARF1) transcript variant 4 | NM_001658 |
| 297 | gi\|68161512 | Cyclic AMP-regulated phosphoprotein 21 kD (ARPP-21) transcript | NM_016300 |
| | | variant 1 | |
| 298 | gi\|56181386 | STIP1 homology and U-box containing protein 1 (STUB1) | NM_005861 |
| 299 | gi\|49640010 | Tetratricopeptide repeat domain 3 (TTC3), transcript variant 2 | NM_001001894 |
| 300 | gi\|34222326 | HMP19 protein (HMP19) | NM_015980 |
| 301 | gi\|16445394 | Cadherin 18, type 2 (CDH18) | NM_004934 |
| 302 | gi\|5730103 | Thioredoxin-like 2 (TXNL2) | NM_006541 |
| 303 | gi\|113428396 | SHC (Src homology 2 domain containing) transforming protein 2 | XM_939572 |
| | | (SHC2) | |
| 304 | gi\|23111046 | Sorting nexin 5 (SNX5), transcript variant 1 | NM_152227 |
| 305 | gi\|13654275 | Queuine tRNA-ribosyltransferase 1 (tRNA-guanine transglycosylase) | NM_031209 |
| | | (QTRT1) | |
| 306 | gi\|82524843 | Multiple EGF-like-domains 6 (MEGF6) | NM_001409 |
| 307 | gi\|12232414 | Family with sequence similarity 59, member A (FAM59A) | NM_022751 |
| 308 | gi\|33286445 | Opioid growth factor receptor (OGFR) | NM_007346 |
| 309 | gi\|74048536 | Praja 1 (PJA1), transcript variant 2 | NM_001032396 |
| 310 | gi\|31652250 | Chromosome 3 open reading frame 19 (C3orf19) | NM_016474 |
| 311 | gi\|35250828 | Coatomer protein complex, subunit gamma (COPG) | NM_016128 |
| 312 | gi\|22748978 | Transmembrane protein 199 (TMEM199) | NM_152464 |
| 313 | gi\|68448524 | CD74 molecule, major histocompatibility complex, class II invariant | NM_004355 |
| | | chain (CD74), transcript variant 2 | |
| 314 | gi\|89111136 | Myosin, light chain 6B, alkali, smooth muscle and non-muscle | NM_002475 |
| | | (MYL6B) | |
| 315 | gi\|38679895 | Pleckstrin homology domain interacting protein (PHIP) | NM_017934 |
| 316 | gi\|17981697 | Cyclin-dependent kinase inhibitor 2C (p18, inhibits CDK4) (CDKN2C), | NM_001262 |
| | | transcript variant 1 | |
| 317 | gi\|149158722 | N-terminal EF-hand calcium binding protein 3 isoform 2 | NM_031232 |
| 318 | gi\|40807453 | Zinc finger protein 133 (ZNF133) | NM_003434 |
| 319 | gi\|17105395 | Ribosomal protein L29 (RPL29) | NM_000992 |
| 320 | gi\|11034854 | TMEM9 domain family, member B (TMEM9B) | NM_020644 |
| 321 | gi\|22749406 | Polymerase (RNA) I polypeptide D, 16 kDa (POLR1D), transcript | NM_152705 |
| | | variant 2 | |
| 322 | gi\|61742795 | Basal cell adhesion molecule (Lutheran blood group) (BCAM), | NM_005581 |
| | | transcript variant 1 | |
| 323 | gi\|113425940 | Similar to eukaryotic translation initiation factor 3, subunit 8, 110 kDa, | XM_001132509 |
| | | transcript variant 4 (LOC728689) | |
| 324 | gi\|34304357 | Nuclear factor of kappa light polypeptide gene enhancer in B-cells | NM_013432 |
| | | inhibitor-like 2 (NFKBIL2) | |
| 325 | gi\|4758985 | RAB11B, member RAS oncogene family (RAB11B) | NM_004218 |
| 326 | gi\|21361279 | Ts translation elongation factor, mitochondrial (TSFM) | NM_005726 |
| 327 | gi\|4503816 | Follicular lymphoma variant translocation 1 (FVT1) | NM_002035 |
| 328 | gi\|14110406 | Heterogeneous nuclear ribonucleoprotein D-like (HNRPDL), transcript | NM_031372 |
| | | variant 2 | |
| 329 | gi\|50345985 | ATP synthase, H+ transporting, mitochondrial F1 complex, beta | NM_001686 |
| | | polypeptide (ATP5B), nuclear gene encoding mitochondrial protein | |
| 330 | gi\|82534391 | Microtubule-associated protein tau (MAPT), transcript variant 4 | NM_016841 |
| 331 | gi\|50234883 | Zinc finger protein 358 (ZNF358) | NM_018083 |
| 332 | gi\|38455403 | Kruppel-like factor 1 (erythroid) (KLF1) | NM_006563 |
| 333 | gi\|55743084 | Asparagine-linked glycosylation 3 homolog (S. cerevisiae, alpha-1,3- | NM_005787 |
| | | mannosyltransferase) (ALG3) | |
| 334 | gi\|42475533 | Calsyntenin 3 (CLSTN3) | NM_014718 |
| 335 | gi\|113423957 | Huntingtin interacting protein 1 related (HIP1R) | XM_001132864 |
| 336 | gi\|4506456 | Reticulocalbin 2, EF-hand calcium binding domain (RCN2) | NM_002902 |
| 337 | gi\|22094134 | DOT1-like, histone H3 methyltransferase (S. cerevisiae) (DOT1L) | NM_032482 |
| 338 | gi\|27764862 | Solute carrier family 25 (mitochondrial carrier; adenine nucleotide | NM_001636 |
| | | translocator), member 6 (SLC25A6) | |
| 339 | gi\|46370065 | Exostoses (multiple) 1 (EXT1) | NM_000127 |
| 340 | gi\|4503528 | Eukaryotic translation initiation factor 4A, isoform 1 (EIF4A1) | NM_001416 |
| 341 | gi\|21359925 | High-mobility group 20A (HMG20A) | NM_018200 |
| 342 | gi\|33598925 | Scavenger receptor class B, member 2 (SCARB2) | NM_005506 |
| 343 | gi\|32880228 | Selenoprotein O (SELO) | NM_031454 |
| 344 | gi\|33695087 | Glycerol-3-phosphate dehydrogenase 1 (soluble) (GPD1) | NM_005276 |
| 345 | gi\|49087144 | Ribosomal protein, large, P0 (RPLP0), transcript variant 1 | NM_001002 |
| 346 | gi\|4758055 | CREB binding protein (Rubinstein-Taybi syndrome) (CREBBP) | NM_004380 |
| 347 | gi\|12232384 | COP9 constitutive photomorphogenic homolog subunit 7B | NM_022730 |
| | | (Arabidopsis) (COPS7B) | |
| 348 | gi\|90903236 | Glutathione peroxidase 4 (phospholipid hydroperoxidase) (GPX4), | NM_002085 |
| | | transcript variant 1 | |
| 349 | gi\|34335280 | Proteasome (prosome, macropain) 26S subunit, non-ATPase, 9 | NM_002813 |
| | | (PSMD9) | |
| 350 | gi\|62388867 | F-box protein 44 (FBXO44), transcript variant 4 | NM_001014765 |
| 351 | gi\|7705806 | Coenzyme Q4 homolog (S. cerevisiae) (COQ4) | NM_016035 |
| 352 | gi\|25777670 | Protein phosphatase 1, regulatory subunit 10 (PPP1R10) | NM_002714 |
| 353 | gi\|4758647 | Kinesin family member 5B (KIF5B) | NM_004521 |
| 354 | gi\|4503100 | Cysteine and glycine-rich protein 2 (CSRP2) | NM_001321 |
| 355 | gi\|54792141 | Reprimo, TP53 dependent G2 arrest mediator candidate (RPRM) | NM_019845 |
| 356 | gi\|29571103 | KiSS-1 metastasis-suppressor (KISS1) | NM_002256 |
| 357 | gi\|16306542 | Fibroblast growth factor 13 (FGF13), transcript variant 1B | NM_033642 |
| 358 | gi\|52630439 | FK506 binding protein 8, 38 kDa (FKBP8) | NM_012181 |
| 359 | gi\|21735620 | Malate dehydrogenase 2, NAD (mitochondrial) (MDH2) | NM_005918 |
| 360 | gi\|13399295 | MYC-associated zinc finger protein (purine-binding transcription | NM_002383 |
| | | factor) (MAZ) | |
| 361 | gi\|58219047 | Hairy and enhancer of split 5 (Drosophila) (HES5) | NM_001010926 |
| 362 | gi\|67906194 | Ankyrin repeat and sterile alpha motif domain containing 6 (ANKS6) | NM_173551 |
| 363 | gi\|20127628 | Zinc finger protein 768 (ZNF768) | NM_024671 |
| 364 | gi\|4758937 | Phospholipase C, beta 2 (PLCB2) | NM_004573 |
| 365 | gi\|11496989 | Poly (ADP-ribose) polymerase family, member 1 (PARP1) | NM_001618 |
| 366 | gi\|113420584 | Similar to CXYorf1-related protein, transcript variant 1 (LOC727741) | XM_001125712 |
| 367 | gi\|32484989 | WD repeat and SOCS box-containing 2 (WSB2) | NM_018639 |
| 368 | gi\|32964831 | Hypothetical protein MGC42174 (MGC42174) | NM_152383 |
| 369 | gi\|20149616 | Neural proliferation, differentiation and control, 1 (NPDC1) | NM_015392 |
| 370 | gi\|34996486 | HesB like domain containing 1 (HBLD1) | NM_194279 |
| 371 | gi\|4758219 | Family with sequence similarity 50, member A (FAM50A) | NM_004699 |
| 372 | gi\|70609878 | Ribosomal protein S2 (RPS2) | NM_002952 |
| 373 | gi\|83267865 | Dynein, light chain, LC8-type 1 (DYNLL1), transcript variant 1 | NM_001037494 |
| 374 | gi\|113422143 | Similar to 60S ribosomal protein L21, transcript variant 2 (LOC731567) | XM_001133519 |
| 375 | gi\|113430220 | CXYorf1-related protein, transcript variant 1 (LOC376475) | XM_377073 |
| 376 | gi\|17986282 | Tubulin, alpha 3 (TUBA3) | NM_006009 |
| 377 | gi\|23238232 | High mobility group nucleosomal binding domain 4 (HMGN4) | NM_006353 |
| 378 | gi\|39725675 | CDK2-associated protein 2 (CDK2AP2) | NM_005851 |
| 379 | gi\|46389548 | Endosulfine alpha (ENSA), transcript variant 3 | NM_004436 |
| 380 | gi\|46389553 | Endosulfine alpha (ENSA), transcript variant 4 | NM_207044 |
| 381 | gi\|46389549 | Endosulfine alpha (ENSA), transcript variant 1 | NM_207042 |
| 382 | gi\|47078237 | G protein pathway suppressor 1 (GPS1), transcript variant 1 | NM_212492 |
| 383 | gi\|47078280 | Family with sequence similarity 53, member B (FAM53B) | NM_014661 |
| 384 | gi\|4757715 | Sperm associated antigen 7 (SPAG7) | NM_004890 |
| 385 | gi\|50557645 | Zinc finger, FYVE domain containing 27 (ZFYVE27), transcript variant | NM_001002261 |
| | | 1 | |
| 386 | gi\|5174742 | Ubiquinol-cytochrome c reductase, Rieske iron-sulfur polypeptide 1 | NM_006003 |
| | | (UQCRFS1) | |
| 387 | gi\|53759121 | Adenomatosis polyposis coli (APC) | NM_000038 |
| 388 | gi\|57242754 | Calsyntenin 1 (CLSTN1), transcript variant 2 | NM_014944 |
| 389 | gi\|7705480 | Ubiquitin-fold modifier conjugating enzyme 1 (UFC1) | NM_016406 |
| 390 | gi\|82659090 | Staufen, RNA binding protein, homolog 1 (Drosophila) (STAU1), | NM_001037328 |
| | | transcript variant T5 | |
| 391 | gi\|83641890 | Glyceraldehyde-3-phosphate dehydrogenase (GAPDH) | NM_002046 |
| 392 | gi\|57222567 | Myeloid/lymphoid or mixed-lineage leukemia (trithorax homolog, | NM_005937 |
| | | Drosophila); translocated to, 6 (MLLT6) | |
| 393 | gi\|14249519 | Hypothetical protein FLJ14668 (FLJ14668) | NM_032822 |
| 394 | gi\|38201669 | Inhibitor of growth family, member 4 (ING4) | NM_016162 |
| 395 | gi\|83656775 | Eukaryotic translation elongation factor 2 (EEF2) | NM_001961 |
| 396 | gi\|20127557 | Chromatin modifying protein 5 (CHMP5) | NM_016410 |
| 397 | gi\|20302149 | Lysophospholipase II (LYPLA2) | NM_007260 |
| 398 | gi\|23238257 | Carnitine palmitoyltransferase 1B (muscle) (CPT1B), | NM_152247 |
| | | nuclear gene encoding mitochondrial protein, transcript variant 4 | |
| 399 | gi\|33286421 | Pyruvate kinase, muscle (PKM2), transcript variant 3 | NM_182471 |
| 400 | gi\|34147626 | Zinc finger protein 447 (ZNF447) | NM_023926 |
| 401 | gi\|38176162 | Ring finger protein 130 (RNF130) | NM_018434 |
| 402 | gi\|47933378 | N-ethylmaleimide-sensitive factor attachment protein, alpha (NAPA) | NM_003827 |
| 403 | gi\|49472815 | Fascin homolog 1, actin-bundling protein (Strongylocentrotus | NM_003088 |
| | | purpuratus) (FSCN1) | |
| 404 | gi\|67189547 | Ribosomal protein L6 (RPL6), transcript variant 2 | NM_000970 |
| 405 | gi\|6912539 | Nucleotide binding protein 2 (MinD homolog, E. coli) (NUBP2) | NM_012225 |
| 406 | gi\|73622128 | Caspase 6, apoptosis-related cysteine peptidase (CASP6), transcript | NM_001226 |
| | | variant alpha | |
| 407 | gi\|83641894 | Heterogeneous nuclear ribonucleoprotein A1 (HNRPA1), transcript | NM_031157 |
| | | variant 2 | |
| 408 | gi\|94721349 | Islet cell autoantigen 1, 69 kDa (ICA1), transcript variant 2 | NM_004968 |
| 409 | gi\|42794610 | 6-phosphogluconolactonase (PGLS), | NM_012088 |
| 410 | gi\|113420239 | Similar to block of proliferation 1 (LOC727967) | XM_001126255 |
| 411 | gi\|14149778 | Chromosome 1 open reading frame 160 (C1orfl60) | NM_032125 |
| 412 | gi\|16306547 | Seryl-tRNA synthetase (SARS) | NM_006513 |
| 413 | gi\|20336240 | Proprotein convertase subtilisin/kexin type 1 inhibitor (PCSK1N) | NM_013271 |
| 414 | gi\|22027621 | TNF receptor-associated factor 4 (TRAF4), transcript variant 1 | NM_004295 |
| 415 | gi\|31543190 | Chromosome 10 open reading frame 58 (C10orf58) | NM_032333 |
| 416 | gi\|32129198 | Cytokine induced protein 29 kDa (CIP29) | NM_033082 |
| 417 | gi\|32455235 | Helicase (DNA) B (HELB) | NM_033647 |
| 418 | gi\|34452680 | Ring finger protein 10 (RNF10) | NM_014868 |
| 419 | gi\|34996518 | Galectin-3 internal gene (GALIG) | NM_194327 |
| 420 | gi\|40804743 | Sema domain, immunoglobulin domain (Ig), transmembrane domain | NM_017789 |
| | | (TM) and short cytoplasmic domain, (semaphorin) 4C (SEMA4C) | |
| 421 | gi\|41393582 | EGF-like-domain, multiple 7 (EGFL7), transcript variant 2 | NM_201446 |
| 422 | gi\|46430498 | V-rel reticuloendotheliosis viral oncogene homolog A, | NM_021975 |
| | | nuclear factor of kappa light polypeptide gene enhancer in B-cells 3, | |
| | | p65 (avian) (RELA) | |
| 423 | gi\|47519746 | Mitogen-activated protein kinase 11 (MAPK11) | NM_002751 |
| 424 | gi\|50233802 | NDRG family member 4 (NDRG4) | NM_020465 |
| 425 | gi\|56090145 | Hypothetical LOC339123 (LOC339123), | NM_001005920 |
| 426 | gi\|71164877 | Ribosomal protein S12 (RPS12) | NM_001016 |
| 427 | gi\|72534683 | Phospholipase D family, member 3 (PLD3), transcript variant 1 | NM_001031696 |
| 428 | gi\|7305502 | Stomatin (EPB72)-like 2 (STOML2) | NM_013442 |
| 429 | gi\|90193629 | Septin 5 (SEPT5) | NM_002688 |
| 430 | gi\|50592995 | Tubulin, beta 3 (TUBB3) | NM_006086 |
| 431 | gi\|16554608 | Mitochondrial ribosomal protein S11 (MRPS11), nuclear gene encoding | NM_022839 |
| | | mitochondrial protein, transcript variant 1 | |
| 432 | gi\|30581139 | Proteasome (prosome, macropain) activator subunit 1 (PA28 alpha) | NM_006263 |
| | | (PSME1), transcript variant 1 | |
| 433 | gi\|31317308 | Phosphatidylinositol-4-phosphate 5-kinase, type I, gamma (PIP5K1C) | NM_012398 |
| 434 | gi\|46048184 | Sterile alpha motif domain containing 10 (SAMD10) | NM_080621 |
| 435 | gi\|56549124 | Dynamin 2 (DNM2), transcript variant 4 | NM_001005362 |
| 436 | gi\|70166553 | GRINL1A combined protein (Gcom1), transcript variant 9 | NM_001018097 |
| 437 | gi\|40795668 | Solute carrier family 38, member 3 (SLC38A3) | NM_006841 |
| 438 | gi\|30410780 | Hypothetical protein FLJ12949 (FLJ12949), transcript variant 2 | NM_178159 |
| 439 | gi\|21361946 | Stathmin-like 4 (STMN4) | NM_030795 |
| 440 | gi\|113413590 | Similar to deoxythymidylate kinase (thymidylate kinase), transcript | XM_001126211 |
| | | variant 4 (LOC727761) | |
| 441 | gi\|113430465 | Similar to ataxin 7-like 3 (LOC392485) | XR_018762 |
| 442 | gi\|22219473 | Fas (TNFRSF6)-associated via death domain (FADD) | NM_003824 |
| 443 | gi\|71361681 | Nuclear mitotic apparatus protein 1 (NUMA1) | NM_006185 |
| 444 | gi\|20336312 | B-cell CLL/lymphoma 11A (zinc finger protein) (BCL11A), transcript | NM_138559 |
| | | variant 3 | |
| 445 | gi\|34147391 | Coiled-coil domain containing 130 (CCDC130) | NM_030818 |
| 446 | gi\|12056467 | Junction plakoglobin (JUP), transcript variant 2 | NM_021991 |
| 447 | gi\|21464122 | Methyl-CpG binding domain protein 3 (MBD3) | NM_003926 |
| 448 | gi\|42544170 | Excision repair cross-complementing rodent repair deficiency, | NM_001983 |
| | | complementation group 1 (includes overlapping antisense sequence) | |
| | | (ERCC1), transcript variant 2 | |
| 449 | gi\|83523747 | Hypothetical protein FLJ13305 (FLJ13305) | NM_032180 |
| 450 | gi\|46358416 | Glutamate receptor, metabotropic 3 (GRM3) | NM_000840 |
| 451 | gi\|39812062 | Mitochondrial ribosomal protein L28 (MRPL28), nuclear gene encoding | NM_006428 |
| | | mitochondrial protein | |
| 452 | gi\|24308369 | Nudix (nucleoside diphosphate linked moiety X)-type motif 16 | NM_152395 |
| | | (NUDT16) | |

1. A method for the diagnosis of prostate carcinoma while excluding inflammatory prostate diseases or diabetes or polymorbidity, comprising determining at least one marker sequence selected from the group SEQ 1-246 and/or SEQ 247-452 or respectively a protein coded thereby or respectively from a partial sequence or fragment thereof on or from a patient to be examined and wherein the marker sequence(s) was/were identified with a method including the
a. Identification of marker sequence candidates using differential screening with protein biochips from respectively a cDNA expression bank of a patient who has prostate cancer and a subject who does not have prostate cancer,
b. Validation of the marker sequence candidates by means of samples from patients who have inflammatory prostate disease(s) and/or samples from patients who have diabetes.

2. The method of claim 1, characterized in that 2 or 3 different marker sequences, are determined on or from a patient to be examined.

3. The method of claim 1, wherein at least one of the marker sequences is selected from the group SEQ ID No. 247, SEQ ID No. 250, SEQ ID No. 290 or a protein coded by SEQ ID No. 247, SEQ ID No. 250, SEQ ID No. 290 or from a partial sequence or fragment of SEQ ID No. 247, SEQ ID No. 250, SEQ ID No. 290, and/or wherein at least one of the marker sequences is selected from the group SEQ ID No. 249, SEQ ID No. 255, SEQ ID No. 271, SEQ ID No. 301, SEQ ID No. 341 or a protein coded by SEQ ID No. 249, SEQ ID No. 255, SEQ ID No. 271, SEQ ID No. 301, SEQ ID No. 341 or from a partial sequence or fragment of SEQ ID No. 249, SEQ ID No. 255, SEQ ID No. 271, SEQ ID No. 301, SEQ ID No. 341.

4. The method of claim 1, wherein at least one marker sequence is a protein selected from the group of neuro-oncological ventral antigen 2 (NOVA2), syntaxin 18 (STX18), heat shock 105 kDa/110 kDa protein 1 (HSPH1) or a nucleic acid coding therefor or a partial sequence or fragment thereof.

5. The method of claim 1, characterized in that the determination is made by means of in vitro diagnosis.

6. The method of claim 1, characterized in that the marker sequence(s) is/are applied to a solid carrier.

7. The method of claim 6, wherein said solid carrier is a filter, a membrane, a magnetic or fluorophore-labeled bead, a silica wafer, glass, metal, plastic, a chip, a target for mass spectrometry, or a matrix.

8. The method of claim 1, wherein said determining step comprises
a.) applying at least one marker sequence selected from the group SEQ 1-246 and/or SEQ 247-452 or respectively a protein coded thereby or respectively from a partial sequence or fragment thereof is/are applied to a solid support and
b.) contacting said solid support of a) with body fluid or tissue extract of a patient and
c.) detecting an interaction of the body fluid or tissue extract with the marker sequence(s) from a.).

9. A method for risk stratification, or for therapy control of a patient with prostate carcinoma, while excluding inflammatory prostate diseases or diabetes or polymorbidity, comprising determining at least one marker sequence selected from the group SEQ 1-246 and/or SEQ 247-452 or respectively a protein coded thereby or respectively a from partial sequence or fragment thereof on or from a patient to be examined.

10. The method in accordance with claim 9, wherein the stratification or therapy control includes decisions regarding treatment and therapy of the patient, in particular hospitalization of the patient, the use, effect and/or dosage of one or more drugs, a therapeutic measure or the monitoring of a course of the disease and the course of therapy or etiology or classification of a disease, including prognosis.

11. Assay, protein biochip comprising an arrangement containing at least one marker sequence of a cDNA respectively selected from the group SEQ 1-246 and/or SEQ 247-452 or respectively a protein coded thereby or respectively from a partial sequence or fragment thereof, characterized in that the marker sequence(s) is/are applied to a solid support and wherein the marker sequence(s) was/were identified with a method including the steps
a) Identification of marker sequence candidates using differential screening with protein biochips from respectively a cDNA expression bank of a patient who has prostate cancer and a subject who does not have prostate cancer,
b) Validation of the marker sequence candidates by means of samples from patients who have inflammatory prostate disease(s) and/or samples from patients who have diabetes.

The application's sequence listing, which the Patent Office published only in electronic form, follows.

SEQUENCE LISTING (452 sequences)

SEQ ID NO: 1 - DNA, 520 bp, Homo Sapiens
ctttaatttattgggaaaaattactaatgaagaggatcgcatcaccatcaccatctcggatcctatttaggtgacactatacaatcgacgacccacgcgtccgccctgggcctgggcctcaactcggccgcagcttccggcgtcctggccgccgtggccgccggggccaacccagcagccgccgccgccgccaacctcctggcatcctactcgggcgaggccggggccgggccagccggaggggccgccccgccgccgcccccgcctcccggagccctggggtcctttgcgttggccgcatccgccaacggctacctcggtgccggggcgggcggcggtgcgggcggagggggcggcccgctggtggccgctgcatccgcggctggggcggccgggggcttcctgacggcggagaatctggcggctgagagtgccaaggagctggtggagattgcggtgcctgatacctggtgggagccatccaggggaagggggtcaagactatggtggagtacctgag

SEQ ID NO: 2 - DNA, 1255 bp, Homo Sapiens
atatttaaagaaggagaaattaactatgagaggatcgcatcaccatcaccatcacggatcctatttaggtgacactatagaatcgtcgacccacgcgtccgctgaagaagaaattcaggaaatctgcttaaagatcttgcagctttatgctcggaaaaaggttgatctcacacacctggagggtgaagtggaaaaaagaaagcacgctatcgaagaggcaaaggcccaagcccggggcctgttgcctgggggcacacaggtgctggatggtacctcggggttctctcctgcccccaagctggtggaatcccccaaagaaggtaaagggagcaagccttccccactgtctgtgaagaacaccaagaggaggctggagggcgccaagaaagccaaggcggacagccccgtgaacggcttgccaaaggggcgagagagtcggagtcggagccggagccgtgagcagagctactcgaggtccccatcccgatcagcgtctcctaagaggaggaaaagtgacagcggctccacatctggtgggtccaagtcgcagagccgctcccggagcaggagtgactccccaccgagacaggccccccgcagcgctccctacaaaggctctgagattcggggctcccggaagtccaaggactgcaagtacccccagaagccacacaagtctcggagccggagttcttcccgttctcgaagcaggtcacgggagcgggcggataatccgggaaaatacaagaagaaaagtcattactacagagatcagcgacgagagcgctcgaggtcgtatgaacgcacaggccgtcgctatgagcgggaccaccctgggcacagcaggcatcggaggtgaggcggggttgcagtgactggtggccgcaagcccttccctggggagtacctgatggctgccctttgacccccggtggctgccctttgacccccggtgtgctctcagcgcaagtggtcctagaacaggattctttttggaaatgtctgtcgactgaaccttggtggatttggaaatggaactgaagggaccggtgacacgtgcttcagaccggtctggggtgcggcgcaacacctgggcccggtgcagggctcagctcggcagcagctcttgatggccagctcaatgaaaaagtgatgcacacgcccatgatgggttgcatgcatgactgatgctaccgcagcgatctccagttccgactgaactcaattacggaagccatagatgatcttagaacct

SEQ ID NO: 3 - DNA, 869 bp, Homo Sapiens
aactaattaagagggaggaattaacctatgagaggatcgcatcaccatcaccatcacggatcctatttaggtgacactatagaatcgtcgacccacgcgtccgcccacgcgtccgcccacgcgtccggcttaagcggagggagtcgagccagcgtcgccgcgatggtgttgttggagagcgagcagttcctgacggagctgaccagacttttccagaagtgccggacgtcgggcagcgtctatatcaccttgaagaagtatgacggtcgaaccaaacccattccaaagaaaggtactgtggagggctttgagcccgcagacaacaagtgtctgttaagagctaccgatgggaagaagaagatcagcactgtggtgagctccaaggaagtgaataagtttcagatggcttattcaaacctccttagagctaacatggatgggttgaagaagagagacaaaaagaacaaaactaagaagaccaaagcagcagcagcagcagcagcagcagcacctgccgcagcagcaacagcagcaacaacagcagcaacaacagcagcaacagcagcacagtaaagggcatacatttcctgctttcaccaattaaccactgaattgctattttttccttttggccagatagctaggtttctggttcccccacagtaggtgttttcacataagattagggtccttttggaaagaatagttgcagtgtttataggatagttgtggtaagaatctagtttattttgcatttggctaattggtctgtgctgcatggttatatactcctggattatagattaaaagtctccgtagacatctctgtgaagagcaagctatcatttaaacatgtcttgtttatctaa

SEQ ID NO: 4 - DNA, 1280 bp, Homo Sapiens
catttttaaagagggagaattaactattgagagggatcgcatcaccatcaccatcacggatcctatttaggtgacactatagaatcgtcgacccacgcgtccgtgaaaaaagtggagaagtctgttaatgaagtgatggaatggatgaataatgtcatgaatgctcaggctaaaaagagtcttgatcaggatccagttgtacgtgctcaggaaattaaaacaaaaatcaaggaattgaacaacacatgtgaacccgttgtaacacaaccgaaaccaaaaattgaatcacccaaactggaaagaactccaaatggcccaaatattgataaaaaggaagaagatttagaagacaaaaacaattttggtgctgaacctccacatcagaatggtgaatgttaccctaatgagaaaaattctgttaatatggacttggactagataaccttaaattggcctattccttcaattaataaaatatttttgccatagtatgtgactctacataacatactgaaactatttatattttcttttttaaggatatttagaaattttgtgtattatatggaaaaagaaaaaaagcttaagtctgtagtctttatgatcctaaaagggaaaattgccttggtaactttcagattcctgtggaattgtgaattcatactaagctttctgtgcagtctcaccatttgcatcactgaggatgaaactgacttttgtcttttggagaaaaaaaactgtactgcttgttcaagagggctgtgattaaaatctttaagcatttgttcctgccaaggtagttttcttgcattttgctctccattcagcatgtgtgtgggtgtggatgtttataaacaagactaagtctgacttcataagggctttctaaaaccatttctgtccaagagaaaatgactttttgcttttgatattaaaaattcaatgagtaaaacaaaagctagtcaaatgtgttagcagcatgcagaacaaaaactttaaacttttctcctctcactatacagtatattgtcatgtgaaagtgtggcatggagaaatgtcgatcctgttgtaactgattgtgaacactttttatgagctttaaaataaagttcattctttatgtgtcaattcttaagaaaaaaataaacaagaatataaaggcggcgcctcccttatattgcagtcgattagccttatactgatcttggaatctgtttgaaaatcgaatgaacctggaatctcacctcttgaaattttgtttcgaacgcctctgcatgagc

SEQ ID NO: 5 - DNA, 1293 bp, Homo Sapiens
  misc_feature (813)..(813): n is a, c, g, or t
  misc_feature (844)..(844): n is a, c, g, or t
  misc_feature (891)..(891): n is a, c, g, or t
  misc_feature (917)..(917): n is a, c, g, or t
  misc_feature (924)..(924): n is a, c, g, or t
  misc_feature (927)..(927): n is a, c, g, or t
  misc_feature (929)..(929): n is a, c, g, or t
  misc_feature (932)..(932): n is a, c, g, or t
  misc_feature (934)..(934): n is a, c, g, or t
  misc_feature (938)..(938): n is a, c, g, or t
  misc_feature (943)..(944): n is a, c, g, or t
  misc_feature (950)..(950): n is a, c, g, or t
  misc_feature (955)..(955): n is a, c, g, or t
  misc_feature (957)..(957): n is a, c, g, or t
  misc_feature (962)..(962): n is a, c, g, or t
  misc_feature (967)..(967): n is a, c, g, or t
  misc_feature (969)..(969): n is a, c, g, or t
  misc_feature (973)..(973): n is a, c, g, or t
  misc_feature (980)..(980): n is a, c, g, or t
  misc_feature (983)..(983): n is a, c, g, or t
  misc_feature (988)..(988): n is a, c, g, or t
  misc_feature (992)..(992): n is a, c, g, or t
  misc_feature (997)..(999): n is a, c, g, or t
  misc_feature (1003)..(1003): n is a, c, g, or t
  misc_feature (1005)..(1008): n is a, c, g, or t
  misc_feature (1012)..(1012): n is a, c, g, or t
  misc_feature (1014)..(1014): n is a, c, g, or t
  misc_feature (1016)..(1016): n is a, c, g, or t
  misc_feature (1018)..(1018): n is a, c, g, or t
  misc_feature (1026)..(1026): n is a, c, g, or t
  misc_feature (1031)..(1032): n is a, c, g, or t
  misc_feature (1042)..(1045): n is a, c, g, or t
  misc_feature (1060)..(1060): n is a, c, g, or t
  misc_feature (1064)..(1065): n is a, c, g, or t
  misc_feature (1067)..(1069): n is a, c, g, or t
  misc_feature (1073)..(1081): n is a, c, g, or t
  misc_feature (1084)..(1084): n is a, c, g, or t
  misc_feature (1086)..(1087): n is a, c, g, or t
  misc_feature (1090)..(1091): n is a, c, g, or t
  misc_feature (1097)..(1099): n is a, c, g, or t
  misc_feature (1104)..(1106): n is a, c, g, or t
  misc_feature (1112)..(1112): n is a, c, g, or t
  misc_feature (1115)..(1115): n is a, c, g, or t
  misc_feature (1117)..(1118): n is a, c, g, or t
  misc_feature (1122)..(1125): n is a, c, g, or t
  misc_feature (1128)..(1128): n is a, c, g, or t
  misc_feature (1133)..(1134): n is a, c, g, or t
  misc_feature (1136)..(1141): n is a, c, g, or t
  misc_feature (1145)..(1145): n is a, c, g, or t
  misc_feature (1152)..(1159): n is a, c, g, or t
  misc_feature (1164)..(1164): n is a, c, g, or t
  misc_feature (1170)..(1172): n is a, c, g, or t
  misc_feature (1177)..(1177): n is a, c, g, or t
  misc_feature (1179)..(1181): n is a, c, g, or t
  misc_feature (1184)..(1193): n is a, c, g, or t
  misc_feature (1197)..(1203): n is a, c, g, or t
  misc_feature (1207)..(1207): n is a, c, g, or t
  misc_feature (1215)..(1215): n is a, c, g, or t
  misc_feature (1217)..(1225): n is a, c, g, or t
  misc_feature (1228)..(1241): n is a, c, g, or t
  misc_feature (1243)..(1253): n is a, c, g, or t
  misc_feature (1255)..(1255): n is a, c, g, or t
  misc_feature (1258)..(1260): n is a, c, g, or t
  misc_feature (1262)..(1271): n is a, c, g, or t
  misc_feature (1273)..(1288): n is a, c, g, or t
  misc_feature (1291)..(1293): n is a, c, g, or t
tagagaaaattactatgagaggatcgcatcaccatcaccattcacggatcctatttaggtgacactatagaatcgtcgacccacgcgtccgggtgtgttcaccggatcagagatagcagagcgccgagttggggccacgaaggcgtgaggggagtcgtcgtccctcctgcacgaaagcgtctaagccttggcgacgccgccctgggggacccacgtcaggcctgggatagggaccgctgtccccgggtccctaccaatgtcgcccgtcgctcccggcccagctctacccgcagagtctgatggcagcggccactctgaggacgccaactcagggcactgtgacctttgaagatgtggccgtacacttctcctgggaggaatggggtctccttgatgaggctcaaagatgcctgtaccgtgatgtgatgctggagaacttggctcttttaacctctctagatgttcatcatcagaagcagcaccttggagaaaaacatttcagaagcaatgtgggcagagccttgtttgtgaagacctgcacattccatgtgtcaggggagccttccacctgcagagaagttgggaaggacttcctggccaagttgggatttctccatcaacaggctgctcacactggggagcaatcaaatagcaaaagcgacggtggggccatcagtcacagaggaaaaactcattacaactgtggagaacacacaaaagcattcagcggtaaaacacacacttgttcagcagcagagaaccctcactacagaaagatgttacatatgcagtgaatgtgggaaaatcctttancaaaagctacagtctcaatgaccattggaanacttcacactggaaaaaaagcctttatgaatgtccaaaagtgtgggnaagtccttttaggcaaagcctctaantctcatncancnccngnaaantttcnnctgcantaacnancctcntgaangntgangaaatgnggnaaaanttantttannnaacnannnntaancntncntttaaaanattcnnaaaaatttcnnnntggggggaaaaaggnccannannnaatnnnnnnnnnaangnnggnnaaaaannnttttnnnccaaanggntnntggnnnnccnttttnnannnnnngggnaaatttnnnnnnnnggggnaaaaannnccttnannnaannnnnnnnnnaaannnnnnnaaantttttttnannnnnnnnnttnnnnnnnnnnnnnnannnnnnnnnnnanaannntnnnnnnnnnngnnnnnnnnnnnnnnnnttnnn

SEQ ID NO: 6 - DNA, 1231 bp, Homo Sapiens
accccattaagagggagaattaactattgagaggatcgcatcaccattcaccatcacggatcctatttaggtgacactatagaatcgtcgacccacgcgtccgcccacgcgtccgatgtaggcaccggtccgagtgcctgccctctgtccccgcggctgggtctcgtctgctccggttcctgggctcctaattcttggtccagcttcttccaggacaggaaaaggaggggaaatctcgacatggaaaaactctacagtgaaaatgaaggaatggcttcaaaccaaggaaagatggaaaatgaagaacagccacaagacgagagaaagccagaagtaacttgtactctggaagacaagaagttagaaaacgagggaaagacagaaaacaagggcaaaacaggagatgaggaaatgttaaaggataaaggaaagccagagagtgagggagaggcaaaagaaggaaagtcagagagggagggagagtcagagatggagggaggatcagagagagagggaaaaccagagatagagggaaagccagagagtgaaggagagccagggagtgaaacaagggctgcaggaaagcgcccagctgaggatgatgtacccaggaaagccaaaagaaaaactaataaggggctggctcattacctcaaggagtataaagaggccatacacgatatgaatttcagcaatgaggacatgataagagaatttgacaatatggctaaggtgcaggatgagaagagaaaaagcaaacagaaattgggggcgtttttgtggatgcaaagaaatttacaggaccccttctaccctagaggtccaagggaattcaggggtggctgcagggccccacgaagggacattgaagacattccttatgtgtagtgtccctgggcaggcatttaccaggccatgtgctttaacgttacggtaatacttttactttaggcatccctcctgttgctagcagccttttgacctatctgcaatgcagtgttctcagtagaaatgttcatcttgttacatggaaaaaatgttgatggtgcattgtaaaattaaaaaacacaacttgcagaaccaaaaaaaacaaatggcggcgctcctaatagtgggagtcgtattagctaaattagctgagcttgactctgctgatgattcagtaatgaccccgaactcaatctgattggttcagaacgcctcggttgccgcccaagagcggttttaattg

SEQ ID NO: 7 - DNA, 1396 bp, Homo Sapiens
  misc_feature (867)..(867): n is a, c, g, or t
  misc_feature (910)..(910): n is a, c, g, or t
  misc_feature (923)..(923): n is a, c, g, or t
  misc_feature (932)..(932): n is a, c, g, or t
  misc_feature (952)..(952): n is a, c, g, or t
  misc_feature (962)..(962): n is a, c, g, or t
  misc_feature (972)..(972): n is a, c, g, or t
  misc_feature (975)..(976): n is a, c, g, or t
  misc_feature (992)..(992): n is a, c, g, or t
  misc_feature (996)..(996): n is a, c, g, or t
  misc_feature (1007)..(1007): n is a, c, g, or t
  misc_feature (1019)..(1019): n is a, c, g, or t
  misc_feature (1024)..(1024): n is a, c, g, or t
  misc_feature (1036)..(1036): n is a, c, g, or t
  misc_feature (1045)..(1045): n is a, c, g, or t
  misc_feature (1051)..(1051): n is a, c, g, or t
  misc_feature (1076)..(1076): n is a, c, g, or t
  misc_feature (1083)..(1083): n is a, c, g, or t
  misc_feature (1106)..(1106): n is a, c, g, or t
  misc_feature (1111)..(1111): n is a, c, g, or t
  misc_feature (1133)..(1133): n is a, c, g, or t
  misc_feature (1148)..(1148): n is a, c, g, or t
  misc_feature (1162)..(1162): n is a, c, g, or t
  misc_feature (1175)..(1175): n is a, c, g, or t
  misc_feature (1210)..(1210): n is a, c, g, or t
  misc_feature (1213)..(1213): n is a, c, g, or t
  misc_feature (1215)..(1215): n is a, c, g, or t
  misc_feature (1224)..(1224): n is a, c, g, or t
  misc_feature (1234)..(1235): n is a, c, g, or t
  misc_feature (1237)..(1237): n is a, c, g, or t
  misc_feature (1242)..(1244): n is a, c, g, or t
  misc_feature (1249)..(1249): n is a, c, g, or t
  misc_feature (1257)..(1257): n is a, c, g, or t
  misc_feature (1260)..(1261): n is a, c, g, or t
  misc_feature (1264)..(1266): n is a, c, g, or t
  misc_feature (1279)..(1279): n is a, c, g, or t
  misc_feature (1284)..(1285): n is a, c, g, or t
  misc_feature (1302)..(1302): n is a, c, g, or t
  misc_feature (1305)..(1305): n is a, c, g, or t
  misc_feature (1312)..(1312): n is a, c, g, or t
  misc_feature (1314)..(1314): n is a, c, g, or t
  misc_feature (1320)..(1320): n is a, c, g, or t
  misc_feature (1322)..(1322): n is a, c, g, or t
  misc_feature (1329)..(1330): n is a, c, g, or t
  misc_feature (1342)..(1342): n is a, c, g, or t
  misc_feature (1345)..(1345): n is a, c, g, or t
  misc_feature (1348)..(1348): n is a, c, g, or t
  misc_feature (1350)..(1351): n is a, c, g, or t
  misc_feature (1362)..(1364): n is a, c, g, or t
  misc_feature (1372)..(1372): n is a, c, g, or t
  misc_feature (1374)..(1374): n is a, c, g, or t
  misc_feature (1378)..(1378): n is a, c, g, or t
  misc_feature (1380)..(1381): n is a, c, g, or t
  misc_feature (1383)..(1384): n is a, c, g, or t
  misc_feature (1386)..(1387): n is a, c, g, or t
  misc_feature (1389)..(1389): n is a, c, g, or t
tagagaaattactatgagaggatcgcatcaccatcaccatcacggatcctatttaggtgacactatagaatcgtcgacccacgcgtccgccccacgccgcggcgcgcccgggctccctgctgatcccagaacaatcaaccatgacgaccgaatctggatcagactcggaatccaagccggaccaggaggccgagccccaggaggcggcgggggcgcaggggcgcgcgggggcgcccgtgccggagccgcccaaggaggagcagcagcaggccctggagcagttcgccgccgctgcagcgcacagcaccccggtgcggagggaggtcactgacaaggaacaggagtttgctgccagggctgcaaaacagctcgaatatcagcaattagaagacgataaactttctcagaaatcatctagcagtaaactctctcggtctccattaaagattgtcaaaaagcctaaaagcatgcagtgcaaagtgatacttctcgatggatcagaatatacctgtgatgtagagaaacgctccagaggacaagtgctgtttgataaagtgtgtgaacacttgaacttgctagagaaagactactttgggcttacgtatcgagatgctgaaaaccagaagaattggttggaccctgctaaggaaataaaaaaacaggttcgaagtggtgcttggcacttttcatttaatgtgaaattttatccaccagaccctgcccaactatctgaagatatcaccaggtactacctctgcttgcagttgcgagatgacatcgtgtccggaaggctgccctgctcctttgttaccctggccttgctgggctcctacactgtccagtcagagctcggagactatgacccanatgaatgtgggagcgattacattagtgagttccgctttgcacnaaccacactaaanaactggaanacaaagtgatcgagctgcanaaaaccccanaggaatgacnccnncaaaaccaaaaatgcntttntttgaaaaatncccaaaaaattntcatngtatggggtaantttacttcntgctanggactccaaaggggtaaaaattttnttagaantttgggcaatggtctgttgaaanttccnaacggctgcaaaaaacaatttncctggcccaggtttnaaaatttttaaaangaaaaattttttnttaaaatcggccgggaaattttaaaattttaaaanccntnggtttaacntccaaccctnnanttccnnnttttngaaaattnttnnacnnnaattttttaaaanggttnnaaaccccccaaaaattnaantgggtcnantttttnangggggannacccaaaaaaanggnttnannccccctttttnnntccaaaantnttcncnntnnannanaaaaaaa

SEQ ID NO: 8 - DNA, 1325 bp, Homo Sapiens
gcttttttaggaggagaatttaactatgagaggatcgcatcaccatcaccatcacggatcctatttaggtgacactatagaatctgtcgactggacagttaaccgattcagtgccagatttcgcagtatctacaaggtccggctacctctgccgccacattaacaaaaaacctcgggcttccagcctgcgcgacagcaaacataagaaggggtgtttttatgtcatccgatattaagatcaaagtgcaaagctttggtcgtttcctcagcaacatggtgatgccaaatatcggcgcgtttatcgcgtggggtatcatcaccgcgttatttattccaacagggtggttaccgaacgagacgctggcgaagctggtcgggccgatgatcacttatctcctgccgctgctgatcggttataccggtggtaagctggtaggcggcgaacgtggcggcgtagtcggtgccatcaccaccatgggcgttatcgtcggcgcagacatgccgatgttcctcggttctatgattgcaggtccgctgggcggctggtgcattaagcacttcgaccgctgggtagacggtaagatcaaatccggttttgagatgctggtgaataacttctccgcaggcatcatcgggatgatcctcgctattctggcattcctcggcattggcccgattgttgaagccctgtccaaaatgctggctgcgggcgttaacttcatggttgtccatgacatgctgccgctggcgtctatctttgttgaaccggcgaaaatcctgttcctcaacaacgccattaaccacggtatcttctcgccgctgggtattcagcagtcccatgaactgggtaaatcaatcttcttcctgattgaagctaacccaggtccaggtatgggcgtgctgctggcgtacatgttctttggtcgtggtagcgctaaacagtctgcgggcggtgcggccaatcaatccacttcctggggggtatccacgaaatctacttcccgtatgtgctgatgaatccgccgtctgatcctcgcagtcatcctcggcggtatgactggcgtgttcacgctgactatcttggggcgggtgtctggtttcttcggcatcctccggggttctatccttgctgtactggcgatgaacacaaaaggtgccttactttcgctaacaatccggtggtgtgtgcggcaaatggctgtctcctcgttgttctctgcatatttgcctgaaaacagcaagtgaagaagaagattgatattggaagcagcaacttcgttcgtatatggtcaagggaactactgataagagcgctgctgtgagtc

SEQ ID NO: 9 - DNA, 1116 bp, Homo Sapiens
aaaatttaagagagaattactatgagaggtcgcatcaccatcaccatcacggatcctatttaggtgacactatagaatcgtcgacccacgcgtccgggcgcgcgggccccggagcgggcgcggcggagcgcggcgagcccggcgcctcccgtcccgaacatgcggaggccggcccaggcggcgcgggagccggagcgggggcccaagcgggcaccggagccggagcgcgagggggcgcggggcccggagcgggggtccgcgctgcgctgctgaggccgggccggccgcccagacgctgcccgcgggcccggccacggcggagccaagctgtgagccgtgagctttgaggcggtgggatgtgtcagcagaatgtctcctgcccccgagagcgaccccgaggccactgagaagagcagcgcggcctggccggcccgaacgcctgcgtctcagtagctgggagccacgggcccacgcccgcccaccggccgcagtgatgttctagccacagaggagccaagacctcaggtttccagagacttgggatttgcacggcagcagagtcaccgtggagaggccagggtatcacaaacttatggattttgacaagaaaggagggaaaggggagacggaggaggggtgctgtggagctgtcttgcccaggccctcctgggagggggacaggcattgttgccaggggtgaggccgtgccccaggcctccccgaaaccaaaggcgaaggcaggggtggggccgtggctgaagccggctccccaaccaaaatgctgcaccacgctcgggcgccgcgggcatggctgctgcagtctcttcccagcctgaccctgccaagtgcgggtggtcgctgcctaggctggtgcttctcgacgcacttgctctcggaggctgctccccgcgcctggaactcgaagttgaaggaactgtttgtcgtcactctgctcgtccatctgttgccatgtggggtacgtgggccctgaatcttcttgctatctgcttcgaagatatgaatacaagtcggtacacaaatatgtcttgacaaccccctgtccaagcctctgcagtaatttagccaaggggccaggtttgctagccctgaatgtct

SEQ ID NO: 10 - DNA, 1200 bp, Homo Sapiens
  misc_feature (846)..(846): n is a, c, g, or t
  misc_feature (912)..(912): n is a, c, g, or t
  misc_feature (923)..(923): n is a, c, g, or t
  misc_feature (960)..(960): n is a, c, g, or t
  misc_feature (986)..(986): n is a, c, g, or t
  misc_feature (995)..(995): n is a, c, g, or t
  misc_feature (1008)..(1008): n is a, c, g, or t
  misc_feature (1019)..(1019): n is a, c, g, or t
  misc_feature (1031)..(1031): n is a, c, g, or t
  misc_feature (1037)..(1037): n is a, c, g, or t
  misc_feature (1048)..(1048): n is a, c, g, or t
  misc_feature (1052)..(1052): n is a, c, g, or t
  misc_feature (1056)..(1056): n is a, c, g, or t
  misc_feature (1061)..(1061): n is a, c, g, or t
  misc_feature (1071)..(1071): n is a, c, g, or t
  misc_feature (1080)..(1080): n is a, c, g, or t
  misc_feature (1090)..(1090): n is a, c, g, or t
  misc_feature (1093)..(1093): n is a, c, g, or t
  misc_feature (1099)..(1099): n is a, c, g, or t
  misc_feature (1116)..(1116): n is a, c, g, or t
  misc_feature (1123)..(1123): n is a, c, g, or t
  misc_feature (1145)..(1145): n is a, c, g, or t
  misc_feature (1154)..(1155): n is a, c, g, or t
  misc_feature (1157)..(1157): n is a, c, g, or t
  misc_feature (1162)..(1162): n is a, c, g, or t
  misc_feature (1186)..(1186): n is a, c, g, or t
  misc_feature (1199)..(1200): n is a, c, g, or t
gaatagagagaattactatgagaggatcgcatcaccatcaccatcacggatcctatttaggtgacactatagaatcgtcgacccacgcgtccggccgctgtgccccgcgccgcatttctctccccgctgcttccccttctcctgggcttcctgctcctctccgctccgcatggcggcagcggcctgcacaccaagggcgcccttcccctggatacggtcactttctacaaggtcattcccaaaagcaagttcgtcttggtgaagttcgacacccagtacccctacggtgagaagcaggatgagttcaagcgtcttgctgaaaactcggcttccagcgatgatctcttggtggcagaggtggggatctcagattatggtgacaagctgaacatggagctgagtgagaaatacaagctggacaaagagagctacccagtcttctacctcttccgggatggggactttgagaacccagtcccatacactggggcagttaaggttggagccatccagcgctggctgaaggggcaaggggtctacctaggtatgcctggttgcctgcctgtatacgacgccctggccggggagttcatcagggcctctggtgtggaggcccgccaggccctcttgaagcaggggcaagataacctctcaagtgtgaaggagactcagaagaagtgggccgagcaatacctgaagatcatggggaagatcttagaccaaggggaggacttcccagcatcagagatgacacggatcgccaggctgattgagaagaacaagatgagtgacgggaagaaggaggagctccagaagagcttaaacatcctgactgccttccagaanaagggggccgagaaaaaggagctgtaaaaaggctgtctgtgattttccagggtttggtgggggtanggaggggaganttaacctgctggctgtgagtcccttgtggaatataanggggtagtgggaaaagtggtactaancccacgatnctgaaccctgaantatgcctgganattgatgctaanatgacnatgcttgggangtcnctanctggnctggggaaanctggaacanttactcaggnggntggggnaaatgaaacctcaaaangaatgantgctttaaaaaggaaaaagaangttatgccnngntcttnaaaaagaaatcccattcattaaanttcagggtttggnn

SEQ ID NO: 11 - DNA, 1271 bp, Homo Sapiens
catcattaaggaaggagaaatttaactatgagaggatcgcatcaccatcaccatcacggatcctatttaggtgacactatagaatcgtcgacccacgcgtccgaaaaaaccaaccaaaccaagaggcatccaaccaagtccaagtcccgcgtcccggccacacgcccgcaccgagggagcacgccggcaggggcgccgaggagcggccccaggacaggacggccccaccgcgtcctggctggcagcacagtgggaacacgcccctccgtctcaggcagtgggggagttggaggggaaggggcctcccttgtgggacccgtggggggctctgttttccatccagtcttcctttcccagcccccaactcccaagacagacagtgtggagcccagcggcggcggagcaggcccgggcctgagcaggcaggcgctgctagcaagacttgatctttgtggccagctgtgccagggggccggcggggctgaggggtgcgggcagctttcatcccaggggctccactgggccccgtcaccctcctgtcgcgtcccctgcgtcccacctccctcctgcccggcagtcccgcccgtgcccccagcctggcgaggaagccgtccaacagtagccccggggccagctcccaacagaaagggctgacgtggctccaggactcaggggcgctccatgggaggacgaaggaagcccagccagccaggagccactcctcacacctccaagtgtggccaagtgggccctgaggccaaggacttacttgctcttcctggccatctctccctttctggaggaggcccggggcctgtgtacaccaaggctgacctcgtgctgcctgctgggacccagccctccctgccgctcccctgtgagcccagtccaccgtgggcgcccagggccagggacgggccagcgcccggctgcatcgcgaggttgggagtcacagtggctgtgggcctggacgggcacagccagagcagggcccatgggaagggcaaggatggggaagcctggccggcctcctccctgctcccaaggcaggtgtccagtggcgggagcagcaccaaggacagccaggctacccggtgggaagagcagaagcagagcaagttgcaggaaggaactcctggcgaagcagggagcactggagataggaaagcagctaaaatacaggctccacggtgctccctgtctcatgaagtccaaatcaataacctacatttcatcgacatcacgctatattggaatggaaatcttctctc

SEQ ID NO: 12 - DNA, 1282 bp, Homo Sapiens
ccattttttagagggagattaactatgagaggatcgcatcaccatcaccatcacggatcctatttaggtgacactatagaatcttcgacccacgcgtccgagctcggtgcagaagcccagcagccggcgtgccgccgcccggccactccagcgccttcttccccgccttgcgctcctgccccaactcgcgctgtcgtcggaccccggcccatccagcagcgctcggcgcccaccaggcggacgcccaggagaacccctgcctccgtcgcggctcctggagagctgatcgttcacctgccccggcccgcctgaggacgggggtgccttcatgcggcccccacactcctcaccccgccgccgccgccgtccccgagctccgcacagtgcgccccagccccagcagggcgcacaactttggaagtctcgcggcgctccgagaggcggcagagtccgcgccccagccccgggccgggccgggccagaaccgcagcgtctgggggaagccagagagtcggtaatcgcttcggggatgtaaggcgacagacataggacccccgagctcgcatcagcacccttcggctgcctcccggggtgggggcgggccccgcacacggtaagacctcttgctttcgctcaggctcaagattcaagatacagatattgatatgtatatatatatttaatttcctgtcatccttccaagttatcaggccaccgatgatttttgttctcccttcttgaagaataaatctctctttacccatcggctctccctactctctcccgccgcttagaaataaaacttggctgtattaggagctcggagcaagaaggcgcccaccgagagcgtctgaagcgcgagccaggcgcagttcgcgggacccgggccatgggccgctagcggtcctccagttcgggcccggcctccctgcgggcccctccctatgtgagccgcagccaggcgagcggggcgccggaggaagaggaggacccacgggcgccgggccggaaggcagctggcagcaggcccaggccagcgggcgcctgcgttcatgttccgcagggagcagccgatgggcgaggcagctttgcgcccatgggcttcctgcagcgggacgcgggcaacgcggagctgggacgggacggaggcgacgggggggcgggcgcccggaccacccccatactcttgcaagtgagcctgaaacgctggatgctggcggctggtctatgctgctcacgtgtcggcaacgtgctctgtctactattcggcgcggtgtgatta

SEQ ID NO: 13 - DNA, 1239 bp, Homo Sapiens
ccttttaaaggaggaagaattaaactatgagaggatcgcatcaccatcaccatcacggatcctatttaggtgacactatagaatcgtcgacccacgcgtccgcgtttcccctactacctctcccggcaccggctgagccactcggggctccggccccacgcctgcccgctgtgccccaaggccttccgccggccggcccacctttcccgccacctgcgcggccacgggccccagcccccgctgcgctgcgccgcctgcccccgcaccttcccagaaccggcccagctcaggcgccacctggctcaggagcacgcgggcggcgaggtcgagctggccatcgagagggtggccaaggagacggccgaacccagctggggcccgcaggacgagggctcggagccgcccaccaccgctgcagcaggggccacggaggaggaggcggtcgcagcgtggcctgagacgtggcctgcgggggagccttccacgctggctgcgcccaccagcgccgcggagccccgggagtcggagtcggaggaggccgaggccggggcagcagagctgagggccgagctggcgctggcggccgggcggcaggaggagaaacaggtcctgctccaggcagactggacgctgctgtgtctgcgctgccgcgaagccttcgccaccaagggcgagctcaaggcgcacccgtgtctgcgccccgagggcgaacaggaaggggaaggggggcccccgccacgccccaagcgacaccagtgctccatctgcctcaaggccttcgccaggccctggtccctgtcgcgccaccggctggtccactccaccgaccgccctttcgtgtgcccagactgcggcctggccttccgcctcgcatcctacctccgccagcaccgccgcgtccacggccccctcagcctgctggccccgctgcccgcggcgggcaagaaaggacgacaaggcctcggtgcacggaactcagccaaggggccggagggggccgacggggcggagtgcgggggtgcctcggaatgggggagaagcgggccagacggaggcgacgccgccccggctcggaccccgccggggagccccgctctgtgcccagagtgcgcaagtttcagcgccgggcgcccctgcgcagcacgggtgaccactcggaaggcgcccatcaatgcggtgccctgcacgagatcaggcgctgctgaacctgccgccagccacatggtggccatcgcgggg

SEQ ID NO: 14 - DNA, 644 bp, Homo Sapiens
tcacataaagaaggaagaattaactatgagaggatcgcatcaccatcaccatcacggatcctatttaggtgacactatagaatcgtcgacccacgcgtccggaggagggttgagctgctgccgccgccgcctctgtcgtcgtcgcgagtgtggagtcgggactggagctgctgccgcggcgacgccggggatctttgtcgctagctcccggcccttctgccccgccgccttccctcagtcagcgttgcccactcctctccggccgggcgcccctgcctccatttctcgctctctgtccaccacacacacggcccccccgatcatggatccgggcagtggcggcggcggcggcggcggcggcggcggcgggagcagcagcggcagcagcagcagcgactcggcgcctgactgctgggaccaggcggacatggaagcccccgggccgggcccttgcggcggcggcggctccctggcggcggcggccgaggcccagcgggagaacctcagcgcggccttcagccggcaactcaacgtcaacgccaagcccttcgtgcccaacgtccacgccgccgagttcgtgccgtccttcctgcggggcccggcatcgccgcctccttcatcttgtatcgcctccaataaccacg

SEQ ID NO: 15 - DNA, 1282 bp, Homo Sapiens
aaccctttaaggaggaggaattaactatgagaggatcgcatcaccatcaccatcacggatcctatttaggtgacactatagaatcgtcgacccacgcgtccgaacctttgccacttcccttacaacccactctctctctgtcactttttcaaaatgatcttcttccacagaagcctggagacactgaagttgtccctggccaagtggacacagggactatggcccccatgatcatgtcttcctcctcttccctccctgcagtaataactgagccagcaggcccagatttggggaccccattcaccagccgcctacccccagaacttcaggtcctaaaggacgaacaggcccatcggttggcccccaagggtaatcagtctcgcatcttgactcaggcctataaacgcatggctgaggaggccatgcagaaggtgtgtggggcagaggaaaatatgtgaaatgaccaggctagtgactggggagttagaggaggagggtgactttctagggttggagaagggccgtgaatagcattcatattgtcctatagcaatcaaatagctctgattcagtgttgccccctacctcccacagaaacatcagaacacaggacctgcccttgagcaagaggacaagaccagcaaggtggctcctggcacagcccctctgcccagactcggggccactcctcaggaatcaagcctcctggccgggatcttagcctcagaattgaagagcagctgggctaaatcagggactggagaggtgccctctgcacctcgggaaaaccggaccaccccagattgtgaacgagcattcccagaggagaggccagaggtgctgggccagcggagcactgatgtagtggacctggaaaatgaggagccagacagtgacaatgagtggcagcacctgctagagaccactgagcctgtgcctattcaactgaaaggctcctctcaccttgctgtgtaatcctgacttctgccagcgcatccagagtcagctgcatgaagctggagggcaggtgaagggctggagaaggaagggagcagaatgggaaatggcacttagtctgaacagaagatcctgaggagaggcccctaatccgtggtccactggtgttctggtgtaagaatcctgaaggcattcttgaagggtgcctcccacatctgctgcaatcggtctgaccagtcttcctctcagcctgcagtgaatcgttgccttgattccgttctgcgagccaaggccttctggacttgctgcctgaactctaacttcg

SEQ ID NO: 16 - DNA, 1216 bp, Homo Sapiens
aaatttttaaggaggagaattactatgagaggatcgcatcaccatcaccatcacggatcctatttaggtgacactatagaatcgtcgacccacgcgtccgctccggggagcagctcctgtggggcagaacggctacacacagttgggggacctggctcagcccggccccgagctttctcccacagcggggtacacagcctggacggcggagaagtagacagtcaggcgctacaggaactgacgcagatggtgtctggccctgcatcgtactctggcccaaagccttctacccagtatggagctccaggaccctttgcagcccctggtgagggaggtgccttggcggccactgggcggcccccgctgctgcccacccgagcttctcgttctcagcgtgcggccagtgaggacatgacgagtgatgaggagcgcatggtcatctgtgaggaggaaggggatgatgatgtcattgctgacgatggcttcggcaccactgacattgatctcaagtgcaaggagcgggtgaccgacagcgagagtggggacagctctggggaggacccagagggcaacaagggctttggtcggaaggtgttttcacctgtgatccgttcctcctttacccactgccgccccccactggaccctgagcccccagggcccccggatcctcctgtagcctttggcaaaggctatggttccgccccatcctcctctgcgtcctcgcctgcttcctcctcagcctcggcagccacctccttctcactgggctcaggaaccttcaaggcccaggagtctggtcagggcagcacagcgggccccctacggcccccaccccctggggctgggggtccagcgacaccttccaaggcaacccggttcctcccaatggatcctgccaccttccggcgcaagagacccgaaagtgtgggtggcctgagccaccaggtcctctcagtcatcgcggcctcttctcagcggaggaggaaacatcctgcagacactggtgctgcccccaacaaggaggagcaagagggcggcggagcagagtgcccttccgcccccgccccatcactgactatggggcccagcagctccctgtccgtctgcgccacatggtcacatggtggtggcgcctgtcagcagcactctgtgcatcgcctctaggtcttcccacctcttgggtgggctggaggcgttctcaatgacacagcca

SEQ ID NO: 17 - DNA, 1409 bp, Homo Sapiens
  misc_feature (1)..(1): n is a, c, g, or t
  misc_feature (3)..(3): n is a, c, g, or t
  misc_feature (927)..(927): n is a, c, g, or t
  misc_feature (929)..(929): n is a, c, g, or t
  misc_feature (933)..(933): n is a, c, g, or t
  misc_feature (943)..(943): n is a, c, g, or t
  misc_feature (946)..(946): n is a, c, g, or t
  misc_feature (954)..(954): n is a, c, g, or t
  misc_feature (962)..(962): n is a, c, g, or t
  misc_feature (969)..(969): n is a, c, g, or t
  misc_feature (978)..(978): n is a, c, g, or t
  misc_feature (991)..(991): n is a, c, g, or t
  misc_feature (997)..(997): n is a, c, g, or t
  misc_feature (1002)..(1002): n is a, c, g, or t
  misc_feature (1004)..(1006): n is a, c, g, or t
  misc_feature (1020)..(1020): n is a, c, g, or t
  misc_feature (1023)..(1023): n is a, c, g, or t
  misc_feature (1029)..(1029): n is a, c, g, or t
  misc_feature (1033)..(1033): n is a, c, g, or t
  misc_feature (1035)..(1035): n is a, c, g, or t
  misc_feature (1068)..(1068): n is a, c, g, or t
  misc_feature (1070)..(1070): n is a, c, g, or t
  misc_feature (1075)..(1075): n is a, c, g, or t
  misc_feature (1077)..(1077): n is a, c, g, or t
  misc_feature (1101)..(1101): n is a, c, g, or t
  misc_feature (1112)..(1112): n is a, c, g, or t
  misc_feature (1119)..(1119): n is a, c, g, or t
  misc_feature (1124)..(1124): n is a, c, g, or t
  misc_feature (1128)..(1129): n is a, c, g, or t
  misc_feature (1137)..(1137): n is a, c, g, or t
  misc_feature (1145)..(1145): n is a, c, g, or t
  misc_feature (1148)..(1148): n is a, c, g, or t
  misc_feature (1150)..(1150): n is a, c, g, or t
  misc_feature (1156)..(1156): n is a, c, g, or t
  misc_feature (1164)..(1164): n is a, c, g, or t
  misc_feature (1171)..(1171): n is a, c, g, or t
  misc_feature (1182)..(1182): n is a, c, g, or t
  misc_feature (1186)..(1188): n is a, c, g, or t
  misc_feature (1195)..(1195): n is a, c, g, or t
  misc_feature (1207)..(1207): n is a, c, g, or t
  misc_feature (1211)..(1211): n is a, c, g, or t
  misc_feature (1226)..(1226): n is a, c, g, or t
  misc_feature (1254)..(1254): n is a, c, g, or t
  misc_feature (1259)..(1259): n is a, c, g, or t
  misc_feature (1278)..(1281): n is a, c, g, or t
  misc_feature (1284)..(1284): n is a, c, g, or t
  misc_feature (1297)..(1297): n is a, c, g, or t
  misc_feature (1306)..(1307): n is a, c, g, or t
  misc_feature (1319)..(1319): n is a, c, g, or t
  misc_feature (1324)..(1324): n is a, c, g, or t
  misc_feature (1333)..(1333): n is a, c, g, or t
  misc_feature (1342)..(1342): n is a, c, g, or t
  misc_feature (1346)..(1347): n is a, c, g, or t
  misc_feature (1349)..(1349): n is a, c, g, or t
  misc_feature (1361)..(1361): n is a, c, g, or t
  misc_feature (1365)..(1365): n is a, c, g, or t
  misc_feature (1373)..(1373): n is a, c, g, or t
  misc_feature (1380)..(1380): n is a, c, g, or t
  misc_feature (1385)..(1385): n is a, c, g, or t
  misc_feature (1391)..(1391): n is a, c, g, or t
ntnagagaaattactatgagaggatcgcatcaccatcaccatcacggatcctatttaggtgacactatagaatcgtcgacccacgcgtccgcgcaagcaggaggcgggggagtcggaggaggtggcggcgctggagctcctcccggggaccagcgacccggggagcgagcacgtcgctccgcaccgctcttcctccagccgctgagccgtcccttctcgccatgtcccagagcaggcaccgcgccgaggccccgccgctggagcgcgaggacagtgggaccttcagtttggggaagatgataacagctaagccagggaaaacaccgattcaggtattacacgaatacggcatgaagaccaagaacatcccagtttatgaatgtgaaagatctgatgtgcaaatacacgtgcccactttcaccttcagagtaaccgttggtgacataacctgcacaggtgaaggtacaagtaagaagctggcgaaacatagagctgcagaggctgccataaacattttgaaagccaatgcaagtatttgctttgcagttcctgaccccttaatgcctgacccttccaagcaaccaaagaaccagcttaatcctattggttcattacaggaattggctattcatcatggctggagacttcctgaatataccctttcccaggagggaggacctgctcataagagagaatatactacaatttgcaggctagagtcatttatggaaactggaaagggggcatcaaaaaagcaagccaaaaggaatgctgctgagaaatttcttgccaaatttagtaatatttctccagagaaccacatttctttaacaaatgtagtaggacatttctttaggatgtacttggccattccttgaggaattctcctggtgaaaaaatcaacttactgaaaagaaagcccccctnantatnccaaatacanatnacatccanctgcttantgaaatngccaggaanaaggttttaatanaaaatntttgnannnaaatgaactgagcnccnatgganaaantnatgtcttgctgaattggcccccagcccccatcncngtctntnaagggttccgggattcccctgggnaatgcaaaaangatgccncttcnatgnntttgcgtntttaaaanaanancaaaanaagtaatntgggccncttaaaaatcnttcnnnaacccanaaaaagtccccntggncccttcccaaaaaanttttcggagggttttgtctgtttcaaancctcnaaaatccccccccccaaannnnttncccccaagttttnaaccttttnnggcccctttttnccaangttttaacnttccccaanaagnntncccttttggccncccnaaaaaaanggttttntgganaaaaanccccccttttaaaaaaaa

SEQ ID NO: 18 - DNA, 1311 bp, Homo Sapiens
tcatttttaaagagggagaatttactatgagaggatcgcatcaccatcaccatcacggatcctatttaggtgacactatagaatcgtcgacccacgcgtccgggctggtttgcgtctacttgggggttaccctgaggctctggctgggcgggcgcgtttgcaccgccgtccctcactgtgggttcgcgacccggggggtggcgggcccgaaccctattgaccaggagcaggaccccgattcctactgggagccggaggaacgggagctgctagaggtggagaggtaccggcttctccccgggccctcagcttgaagcagggcctcgtgccccggcgctccattgcacgcccccttggagccgggtgtcctgccgctgcttgcgcagcggcccttgtttcttcttacccgttgttaggggcgcaccgacaagcgtgccggtcccctggaaccactggtcccttcaggagagacgtatttcgacatccatttagagagttcggcctgcttactggtgggccttgttctgggcgttagctttctgggtggactgatcagctgctgcccgggaacgtgttccggttgcccttgcaatcaaagataacagagatgggcgctccatgatttagcctgaggctcttcgacatccattctgcttccacgcctggcttcaggcattggatgtcttcccccaccaccctggaaacgacaaagaagaaaaatccgatgccagagaattcggagacaaatggaggcgcctggtgcgcccgcccagtaccctgacgtgcgaatgcctggagcacatcccgtatttacatgaggaatttcgagagtcctgctcatttctctagttggctgatagctttgatgtcaccactgttgtgatcctgagagttatctcgactgagatttttcccacattggcgcggaagccgacgcgggatccaacagttcattatgaaagctggggatggccactcgctgtcttacctccccggcttctcgacataccgctcagctgatcactccacgactgtttgtaccaggctctctgctgatgctgagcatgaactgtactcgactgcccagcacgtgcatatttgcagtgagtcagccagactgtcagctcggaaatgcacctccatggaagacggacgaagatactatgcaaatcacgctgcctcgaggaaaagctctggcctggctgctgcacctctttagtcatcccatgaaagcgtactagttctctgaatggtatggccaggagcgtaacgtcatggctggatgttcactcacgattgaggtttccccat

SEQ ID NO: 19 - DNA, 1298 bp, Homo Sapiens
caatttttaagaagagaattaaactatgagaggatcgcatcaccatcaccatcacggatcctatttaggtgacactatagaatcgtcgacccacgcgtccggctgctcctatggaagcgctctttctgctcctgcccaaggcctgcttacaactcccacacggcagaagatgacatcctggatgtatgtggaagccagcgccaggagcttccggatgacggggacttcgccacccccccggggcgttctgaccccctgccggctgcctccctgctgacgcccccgacctcggtgacctgcacctgagagaaccactggacctggtggttcatggggaacacggtactggagcaggacccgctggtggggggtggcccccgcctcctcccgggcagccctgcctcgtccatcccagcgggttgcgcagggaggagcccgaccttcagcctcaactggccctggaaggaccacgccgccctacccctcctgctccttccaattctgagatgttccgcccaccgtcccctttggtcgggaagcggcccccgccgggacccccggttttacccgcggccacgcccacgtctacccttcgtcgcactcctcatcctgtgctgttttacgatcctttaccgaacacagtcctcttattacgtattgtcgtccgggccctccctggcgggcaccgctttgtcccgaccccacactgtactgagcaaggtctgcaggcgactgtccgcgtggagacgatcgcctacggtgttgcatgtcggttccggcattttgaaacatctgcagttcttcgaggagcgacggcgcagcctggagcgcagcgactcgccgccggcgcccctgcggccctgggtgcccctgcgcacggcccgctctctggagcatcaccaattcagagcgcgacgcaccgatgcggcatccccggtgcctcacaggcataacagctggatgccggatttgcgtcgaagagctcgcgtcggcctggtgcagcttaatagtgggcgtcgaatgcgacgagtagcacgcggtcagattctgcccgagactcaggaacctctaagacatgcgacatacgaacaatccatcgtgggatcgcatcggtcgacttcatcgctaactggcagcgaacatggatgagacttcggaaggattcatggccagctgcgtctagtcgagccgtgactcacatcccacctggaaagctcggactagatgcccgcgcttacgtacgcatgcaaacctagacactcgttgtaaccttggacctctaatcgtcacgtatacta

SEQ ID NO: 20 - DNA, 1255 bp, Homo Sapiens
aaatttttagaggagaaattactatgagaggatcgcatcaccatcaccatcacggatcctatttaggtgacactatagaatcgtcgacccacgcgtccggccggcccggcggcgggtcacgtgagcggaaaatggcggccccggcaggcggcggaggctccgcggtgtcggtgctggccccgaacggccggcgccacacggtgaaggtgacgccgagcaccgtgctgcttcaggttctggaggacacgtgccggcggcaggacttcaacccctgtgaatatgatctgaagtttcagaggagcgtgctcgacctttctctccagtggagatttgccaacctgcccaacaatgccaagctggagatggtgcccgcttcccggagccgtgaggggcctgagaacatggttcgcatcgctttgcagctggacgatggctcgaggttgcaggactctttctgttcaggccagaccctctgggagcttctcagccattttccacagatcagggagtgcctgcagcaccccggcggggccaccccagtctgcgtgtacacgagggatgaggtgacgggtgaagctgccctgcggggcacgacgctgcagtcgctgggcctgaccgggggcagcgccaccatcaggtttgtcatgaagtgctacgaccccgtgggcaagaccccaggaagcctgggctcgtcagcgtcggctggccaggcagccgccagcgctccacttcccttggaatctggcgagctcagccgcggcgacttgagccgtccggaggacgcggacacctcagggccctgctgcgagcacactcaagagaagcagagcacaagggcacccgcagctgccccctttgttcctttctcgggtgggggacagagactggggggccctcctgggcccacgaggcctctgacatcatcttcagctaagatgccgaagtccctctccagccctggaggcccctccaagccaaagaagtccaagtcgggccaggatcccagcatgagcagagcaggagcgggagctggcatccctatcaggagcaggagcggagcggcccgatgaccggcagcccgatgaacgggagcccgtggtgtgcaccccgaactgcagaagcgctgcagcttggccagcgactgcctgaatgagtctttgagctgacggtgacgaactggagaaagacgcttggacagtcaagttgagcgaaggctctgcagaagtctccttggtgtgacaaaggacctttcaca

SEQ ID NO: 21 - DNA, 1231 bp, Homo Sapiens
aatttttaaggagggagaattactatgagaggatcgcatcaccatcaccatcacggatcctatttaggtgacactatagaatcgtcgacccacgcgtccgatcaaaacgaggacgaacccattcgtgttagctaccatcggaatatccactataattcagtggtgaatcctaacaaggccaccattggtgtggggctgggcctgccatcattcaaaccagggtttgcagagcagtctctgatgaagaatgccataaaaacatcggaggagtcatggattgaacagcagatgctagaagacaagaaacgggccacagactgggaggccacaaatgaagccatcgaggagcaggtggctcgggaatcctacctgcagtggttgcgggatcaggagaaacaggctcgccaggtccgaggccccagccagccccggaaagccagcgccacatgcagttcggccacagcagcagcctccagtggcctggaggagtggactagccggtccccgcggcagcggagttcagcctcgtcacctgagcaccctgagctgcatgctgaattgggcatgaagcccccttccccaggcactgttttagctcttgccaaacctccttcgccctgtgcgccaggtacaagcagtcagttctcggcaggggccgaccgggcaacttccccccttgtgtccctctaccctgctttggagtgccgggccctcattcagcagatgtccccctctgcctttggtaagcctcctttgtctggggggatggaggctgctaggagctgggagagactggaagaagtggcaagtcctgagaggggctttctggagcctctggccatctccccaagaaaagaagggagaggcactggaggggatttttcagatccaaggaatttgccccagaaagggtctggggtctaagtggggtttcacaggcctagcagatccttctgttttgagaaaggagtgagaagggccctatgggatttctccagagccccagatgtcggcacagggtgaggagaggcaggctgagagcgctccatcatccttttcctcttcctctcgcccagcaggtctgatgactgggatgatgatgagatcctagcttcggtgctggccagtgtccaacaggaataccttagaacagtatggaagaaaacaagtgcacagagagactcgccctctagagacaagaagttggatgggagaatctcttcaaggggaa

SEQ ID NO: 22 - DNA, 1272 bp, Homo Sapiens
catcttaaagaggagaattaaactatgagaggatcgcatcaccatcaccatcacggatcctatttaggtgacactatagaatcgtcgacccacgcgtccgggcgggcacccggcggccaggagagagagggagggcgccacgcaccggactgcgggccgagagcgcgcacgccgcgctccgcccctgctgccgcccccgtcgccgccgccgccgccgccgcagcttgggaggtgctgccaccacaggtacctgcacatgttgttctttgtcagtgctggcacaagaacctcctggcagtagatgtatttcgttcacctttgtcccgggcattccaactggtggaggagatccggaaccacgtgctgagagacagctctgggatcaggagcttggaggagttgtgtctgcaagtgaccgacctgctgccaggccttaggaagctcaggaacctactccctgagcatggatgcctgctgctgtcccctgggaacttctggcagaatgactgggaacgcttccatgctgatcctgacatcattgggaccatccaccagcacgagcctaaaaccctgcagacttcagccacactcaaagacttgttatttggtgttcctgggaagtacagcggggtgagcctctacaccaggaagaggatggtctcctacaccatcaccctggtcttccagcactaccatgccaagttcctgggcagcctgcgtgcccgcctgatgcttctgcaccccagccccaactgcagccttcgggcggagagcctggtccacgtgcacttcaaggaggagattggtgtcgctgagctcatcccccttgtgaccacctacatcatcttgtttgcctacatctacttctccacgcggaagatcgacatggtcaagtccaagtgggggctggccctggctgccgtggtcacagtgctcagctcgctgctcatgtctgtgggactctgcacactcttcggcctgacgcccaccctcaatggcgggtaggtccctagcaggctccactgggcacaggtgggctcaggccagagagccttgcacttctgggttcttggccttccctgacttgctggtgacctcacgttcttcacattgtgttttgacaaatttagaggtacattttcttctctcttgtctgcttggaatcatactgtgattggtaatagcatattctagcctatagtgaatgtcaattgtacaatgccaatttgtggctggaggagtatataaaggggtgctgctgatgtgtgggca

SEQ ID NO: 23 - DNA, 1246 bp, Homo Sapiens
aaatttaaagagggagaattaactatgagaggatcgcatcaccatcaccatcacggatcctatttaggtgacactatagaatcgtcgacccacgcgtccggaaccatgaacgcccacctgccgtttgctgtcattggcagcacagaagaactgaagataggcaacaagatgatgagggcgcggcagtatccttggggcactgtgcaggttgaaaacgaggcccactgcgactttgtgaagctgcgggagatgctgattcgggtcaacatggaggatctgcgggagcagacccacacccggcactatgagctgtatcgccgctgtaagctggaggagatgggcttcaaggacaccgaccctgacagcaaacccttcagtttacaggagacatatgaggccaaaaggaacgagttcctaggggaactccagaaaaaagaagaggagatgagacagatgttcgtccagcgagtcaaagagaaagaagcggagctcaaagaggcagagaaagagctgcacgagaagtttgaccgtctgaagaaactgcaccaggacgagaagaagaaactggaggataagaagaaatccctggatgatgaagtgaatgctttcaagcaaagaaagacggcggctgagctgctccagtcccagggctcccaggctggaggctcacagactctgaagagagacaaagagaagaaaaactttttttaatcttgtcttcagcagctgcactaagtctaaaggagaagactgccattatagaagagttagggttccatattgtctcaaatcagaaatcaaccaatttcctctcccctcaaactgcaagcacacacacatacaccacaccactcaacaagtgttcatgtgtccctgtgtccaggcaagaagctctcttcctgactcacatggtattttaatggaagtgtcttgtcctaactaacaaggcaggaaaagacccatcagagctggaaaatggacgaatgtaacctcagagaaacactacaggaccactcacccaagtgtagtgactggggcagacacctcagctgtggtatgaagtactgtcttgttccacaggttttgtttgagttattgttttttcttttaaacatttcctcttggttcgattgggtgactgtctacagtcactgtaaccatttctggatatggccagagaaaggtcaggacatttgatcttctcagcattcgcagaccttctaataggattccatgctaaatggga

SEQ ID NO: 24 - DNA, 1255 bp, Homo Sapiens
taattattaaagaaggagaatttaactatgagaggatcgcatcaccatcaccatcacggatcctatttaggtgacactatagaatcgtcgacccacgcgtccgcggacgcgtgggcggagccctgccgtgtgggagctggccgaggagtatctggacatcgtgcgggagcacccctgccccctgtcctacgtccgggcccacctcttcaagctgtggcaccacacgctgcaggtgcaccaggagctgcgagaggagctggccaaggtgaagaccctggagggcatcgctgctgtgagccaggagctgaagctgcggtgtcaggaggagatatccaggcaggagggagcgaagcccaccggcgacttgcccttccactggatctgccagccctacatccggccggggcccagggaggggagcaaggagaaggcaggtgcgcgcagcaagcgggccctggaggaagaggagggtggcacggaggtcctgtccaagaacaagcaaaagaagcagctgaggaacccccacaagaccttcgacccctctctgaagccaaaacatgcaaagtgtgaccagtgtggaaacccaaaggtgagtgggttccggctgcaagccaccaaggcttcagctttgggggtgggcagggtggtctctgcactgcttggggtggcaggtctggtgcccgcccagctgggtttgcaacgtggctcaaggtggcatggatgcctcaggacggccccttgcttccagccaagcccctgcccaggcctggaggggaagagagtctgggtgggttggggtgagggagaggcatctggcttgggagcagttcccagggctgcatccaggccgtgggcatctggcagaggcttccccagtggggctgctcccctgctggccagcctggccccgggagtggtgctgggccacaggctcccgagatttcctgtgcccagggcaacagatgtgtgttcagcctgtgccgcggctgctgcaagaaagcgagccctccaaagagacttgcagactgctcaggtcacgggattgctttttaaaaccaaattggagaagtctctggtcctgtaaagaggcccagccctgaagcctgcaggagcctcagcagcagcacctggaacaccaaggtggcctttcttcgaggtcatgggccagtgtccctgcttgagcccacaccccaccccagaactgctgctgagcttgaaccgttccttacttaagaaatggcctttttactcaggg

SEQ ID NO: 25 - DNA, 1266 bp, Homo Sapiens
taattttaagaagggagaattaactatgagaggatcgcatcaccatcaccatcacggatcctatttaggtgacactatacaatcttcgacccacgcgtccgggcgggcacagcgaggggcggggcgcgggccgggagcggcgggcaggccgggcatggcgtccatggcggcggcgatcgcggcttcgcgctcggcggtcatgagcgggaaccggcctctggacgaccgggagcgaaagcgcttcacttacttctcgtcgctgagccccatggccaggaagatcatgcaggacaaggagaagatccgcgagaagtacgggcccgagtgggcgcggctgccgcccgcgcagcaggacgagatcatcgaccggtgcctggtggggccgcgcgccccggcgccccgagaccccggggactcggaggagctcacgcgcttccccggcttgcgcgggcccacgggccagaaggtggtgcgcttcggggacgaggatctaacttggcaagatgagcactctgcccctttctcctgggaaacaaagagtcagatggagttcagtatctccgccctatccatccaggagccgagcaacggcaccgccgccagcgagcccagaccactgtccaaagcttcccagggctcccaggccctcaagtcctcccaaggcagcaggtcctccagcctggacgccctgggccccaccaggaaggaggaggaagcgtcattctggaagatcaatgctgagcggttcccgaggggaggggcctgaggccgagttccagtcgctgacccctagccagatcaagtccatggagaagggggaaaaggtcttgcctccctgctaccggcaggaaacctgccccgaaggacagggaggccaaggtggaagggcccagcaccctccgtcaggagcagcgtcctcttcccaacgtgagcaccgaacgtgagagaccccagcctgtccaggccttcagcagtgcactgcacgaggctgcccccttcccagctcgaaggggaagctgccatcttcctgatgtcaggcaaggacgatggggaagaacaccctggttctcggaaacccaagtttgcacaggttcagctcaagtaatgtcgtcttggaagacggattgattctctggacaattgctaaaatggattagaaaaaatacatgaagaacccttaaaatgctttcccaagtggtgtgcctgcagagattaaacgggccactttcaatggaattttacggcttcttgtgacaactcccatat

SEQ ID NO: 26 - DNA, 1281 bp, Homo Sapiens
attcctttagagggagaatttaactaatgagaggatcgcatcaccatcaccatcacggatcctatttaggtgacactatagaatcgtcgacccacgcgtccgccgagcgctactgccagctgatgccgggagctaactaccgcgccggggccggggccggggccggggcccgacgtccccgcggggcccgggaccgcgaggaggacggcgggggcctggagcccgcggccgtggcccgcgacctattgaggggcacatctaacatgtcatttgaggagctgttggaattgcagagccaagtggggactaagacgtacaaacaattggtagctggaaatagtcctaagaaacaagcttctagaccacctatccaaaatgcatgtgttgcagataagcacaggcctctggaaatgtcagccaagatccgagtaccatttttacgtcaggttgttcccattagtaaaaaggtagcccgggaccctcgctttgatgatctgtcaggggaatataatcctgaggtgtttgacaaaacataccaattcttgaatgacatccgagcgaaagagaaagagcttgtgaaaaaacagttgaagaagcacctttcaggagaggagcatgagaaactgcagcaactgcttcagcgaatggagcagcaagaaatggcacagcaggaacgaaagcaacagcaggagctgcacctggccctgaagcaagaacgtcgggctcaggcccagcagggccatcggccatacttcctgaaaaaatctgagcagcgccagttggcactagctgagaagttcaaggagctgaaacgcagcaagaaattggagaacttcttgagtcgaaagaggcgacgaaatgcaggcaaggacaggagacatctccctttgagcaaagagtaataaaggaactatcctctgctctgcccactgccccagggagacatggatctgtgaggacagatttgggccacgggctgggtttccgttcaagggcaagggatcacagctgcccttgaatctcattgccctcagagaagactagagggcctcttgggactaatccctagggctaacacaagaattagttcagcctttctgccattgcccacacagccctcagccttgaatctgggttcattggcgtccctcggtttcctttcctccatcatgccctttaacccaggatctgaatcgaaaaagagggccaatgaaaacatgaagtcgttaggacctccaaggctggaactaatgtaggaagaccactcctttcataaacaca

SEQ ID NO: 27 - DNA, 1000 bp, Homo Sapiens
gccttttaaggagggagaaattaactattgagaggatcgcatcaccatcaccatcacggattcctatttaggtgacactatagaatcgtcgacccacgcgtccgcggcgggcggcgggcgggccgagggcagcgcgggccggcctcgtcctcgccctcctggcctgggtgcggccccccgggtcccggcgcccactgccccggcgtcccgcgctccgcgcccgcccacgcccccaccagcggcgccgacctcagcgcgcacctatggactcgctaccaagacatgcggaaactggtgcacgacctcctgccccccgaggcctgccgtctcctgaacccaccagccatctacaccaacaacgagatcagcctgcgtgacgttgaggtctacggctttgactacgactacaccctgggccagtatgcagacgcactgcaccccaagatcttcagtaccgcccgtgacatcctgatctagcactacaagtacacagaaaggattcgaaaggatgactaccaccccagctttgccatccgtggcctccactatgacattcagaagaccgttcttgatgaaaattgacgccttcctctacgtgctgctggggacagcctacaggggtctccaacctgtgtcagactaggaggtgattgagatgtatgttggtaccctgcacgtcccactataccaaatgaatgacttctatggatagggtccctctattaagcaattatggacatcttcaccctaacggagatggctctgcagtcctgtgtggtggactactaactgggccacaggctggagattgaccaagcgcatctctacaatgacttgaccgactcccatccgaaatttgtatgaaaaggggctcctgtaccagtggttttaacctggacatggttcaagtccattcatgagaggggaatgacaattatgctggatcctgagtcgcttgggagggtccctggtgaaaaatcctgttccttcaatctcaaca

SEQ ID NO: 28 - DNA, 1354 bp, Homo Sapiens
  misc_feature (330)..(330): n is a, c, g, or t
  misc_feature (538)..(538): n is a, c, g, or t
  misc_feature (586)..(586): n is a, c, g, or t
  misc_feature (618)..(618): n is a, c, g, or t
  misc_feature (621)..(621): n is a, c, g, or t
  misc_feature (655)..(655): n is a, c, g, or t
  misc_feature (691)..(691): n is a, c, g, or t
  misc_feature (705)..(705): n is a, c, g, or t
  misc_feature (708)..(708): n is a, c, g, or t
  misc_feature (712)..(712): n is a, c, g, or t
  misc_feature (714)..(714): n is a, c, g, or t
  misc_feature (719)..(719): n is a, c, g, or t
  misc_feature (726)..(726): n is a, c, g, or t
  misc_feature (732)..(732): n is a, c, g, or t
  misc_feature (734)..(734): n is a, c, g, or t
  misc_feature (738)..(738): n is a, c, g, or t
  misc_feature (740)..(740): n is a, c, g, or t
  misc_feature (743)..(743): n is a, c, g, or t
  misc_feature (747)..(747): n is a, c, g, or t
  misc_feature (749)..(749): n is a, c, g, or t
  misc_feature (755)..(755): n is a, c, g, or t
  misc_feature (758)..(759): n is a, c, g, or t
  misc_feature (769)..(769): n is a, c, g, or t
  misc_feature (774)..(774): n is a, c, g, or t
  misc_feature (776)..(776): n is a, c, g, or t
  misc_feature (779)..(780): n is a, c, g, or t
  misc_feature (790)..(790): n is a, c, g, or t
  misc_feature (792)..(792): n is a, c, g, or t
  misc_feature (797)..(797): n is a, c, g, or t
  misc_feature (799)..(799): n is a, c, g, or t
  misc_feature (802)..(803): n is a, c, g, or t
  misc_feature (808)..(808): n is a, c, g, or t
  misc_feature (811)..(811): n is a, c, g, or t
  misc_feature (819)..(820): n is a, c, g, or t
  misc_feature (822)..(822): n is a, c, g, or t
  misc_feature (824)..(824): n is a, c, g, or t
  misc_feature (833)..(833): n is a, c, g, or t
  misc_feature (835)..(835): n is a, c, g, or t
  misc_feature (840)..(840): n is a, c, g, or t
  misc_feature (842)..(842): n is a, c, g, or t
  misc_feature (845)..(845): n is a, c, g, or t
  misc_feature (849)..(850): n is a, c, g, or t
  misc_feature (852)..(852): n is a, c, g, or t
  misc_feature (854)..(854): n is a, c, g, or t
  misc_feature (857)..(857): n is a, c, g, or t
  misc_feature (863)..(864): n is a, c, g, or t
  misc_feature (870)..(872): n is a, c, g, or t
  misc_feature (875)..(875): n is a, c, g, or t
  misc_feature (877)..(877): n is a, c, g, or t
  misc_feature (879)..(880): n is a, c, g, or t
  misc_feature (883)..(885): n is a, c, g, or t
  misc_feature (889)..(890): n is a, c, g, or t
  misc_feature (892)..(893): n is a, c, g, or t
  misc_feature (898)..(899): n is a, c, g, or t
  misc_feature (905)..(905): n is a, c, g, or t
  misc_feature (908)..(909): n is a, c, g, or t
  misc_feature (912)..(912): n is a, c, g, or t
  misc_feature (916)..(916): n is a, c, g, or t
  misc_feature (919)..(919): n is a, c, g, or t
  misc_feature (921)..(923): n is a, c, g, or t
  misc_feature (926)..(926): n is a, c, g, or t
  misc_feature (928)..(931): n is a, c, g, or t
  misc_feature (933)..(933): n is a, c, g, or t
  misc_feature (935)..(935): n is a, c, g, or t
  misc_feature (938)..(938): n is a, c, g, or t
  misc_feature (941)..(944): n is a, c, g, or t
  misc_feature (947)..(947): n is a, c, g, or t
  misc_feature (949)..(949): n is a, c, g, or t
  misc_feature (951)..(951): n is a, c, g, or t
  misc_feature (959)..(967): n is a, c, g, or t
  misc_feature (972)..(974): n is a, c, g, or t
  misc_feature (980)..(980): n is a, c, g, or t
  misc_feature (983)..(987): n is a, c, g, or t
  misc_feature (989)..(990): n is a, c, g, or t
  misc_feature (992)..(992): n is a, c, g, or t
  misc_feature (994)..(995): n is a, c, g, or t
  misc_feature (1000)..(1001): n is a, c, g, or t
  misc_feature (1003)..(1003): n is a, c, g, or t
  misc_feature (1007)..(1007): n is a, c, g, or t
  misc_feature (1014)..(1022): n is a, c, g, or t
  misc_feature (1025)..(1025): n is a, c, g, or t
  misc_feature (1027)..(1029): n is a, c, g, or t
  misc_feature (1031)..(1032): n is a, c, g, or t
  misc_feature (1034)..(1034): n is a, c, g, or t
  misc_feature (1036)..(1042): n is a, c, g, or t
  misc_feature (1044)..(1045): n is a, c, g, or t
  misc_feature (1048)..(1050): n is a, c, g, or t
  misc_feature (1053)..(1055): n is a, c, g, or t
  misc_feature (1057)..(1057): n is a, c, g, or t
  misc_feature (1060)..(1061): n is a, c, g, or t
  misc_feature (1063)..(1066): n is a, c, g, or t
  misc_feature (1068)..(1070): n is a, c, g, or t
  misc_feature (1074)..(1077): n is a, c, g, or t
  misc_feature (1079)..(1081): n is a, c, g, or t
  misc_feature (1084)..(1087): n is a, c, g, or t
  misc_feature (1089)..(1094): n is a, c, g, or t
  misc_feature (1097)..(1097): n is a, c, g, or t
  misc_feature (1099)..(1101): n is a, c, g, or t
  misc_feature (1103)..(1104): n is a, c, g, or t
  misc_feature (1108)..(1109): n is a, c, g, or t
  misc_feature (1113)..(1115): n is a, c, g, or t
  misc_feature (1117)..(1117): n is a, c, g, or t
  misc_feature (1121)..(1122): n is a, c, g, or t
  misc_feature (1124)..(1124): n is a, c, g, or t
  misc_feature (1126)..(1127): n is a, c, g, or t
  misc_feature (1130)..(1133): n is a, c, g, or t
  misc_feature (1135)..(1142): n is a, c, g, or t
  misc_feature (1144)..(1145): n is a, c, g, or t
  misc_feature (1148)..(1153): n is a, c, g, or t
  misc_feature (1155)..(1161): n is a, c, g, or t
  misc_feature (1163)..(1165): n is a, c, g, or t
  misc_feature (1171)..(1172): n is a, c, g, or t
  misc_feature (1174)..(1174): n is a, c, g, or t
  misc_feature (1176)..(1176): n is a, c, g, or t
  misc_feature (1178)..(1181): n is a, c, g, or t
  misc_feature (1183)..(1183): n is a, c, g, or t
  misc_feature (1186)..(1187): n is a, c, g, or t
  misc_feature (1189)..(1189): n is a, c, g, or t
  misc_feature (1191)..(1194): n is a, c, g, or t
  misc_feature (1196)..(1196): n is a, c, g, or t
  misc_feature (1198)..(1199): n is a, c, g, or t
  misc_feature (1201)..(1201): n is a, c, g, or t
  misc_feature (1205)..(1209): n is a, c, g, or t
  misc_feature (1217)..(1217): n is a, c, g, or t
  misc_feature (1223)..(1228): n is a, c, g, or t
  misc_feature (1230)..(1232): n is a, c, g, or t
  misc_feature (1234)..(1234): n is a, c, g, or t
  misc_feature (1236)..(1239): n is a, c, g, or t
  misc_feature (1242)..(1248): n is a, c, g, or t
  misc_feature (1251)..(1251): n is a, c, g, or t
  misc_feature (1253)..(1256): n is a, c, g, or t
  misc_feature (1258)..(1260): n is a, c, g, or t
  misc_feature (1262)..(1262): n is a, c, g, or t
  misc_feature (1264)..(1264): n is a, c, g, or t
  misc_feature (1266)..(1269): n is a, c, g, or t
  misc_feature (1271)..(1271): n is a, c, g, or t
  misc_feature (1273)..(1273): n is a, c, g, or t
  misc_feature (1275)..(1277): n is a, c, g, or t
  misc_feature (1280)..(1281): n is a, c, g, or t
  misc_feature (1283)..(1283): n is a, c, g, or t
  misc_feature (1285)..(1287): n is a, c, g, or t
  misc_feature (1289)..(1290): n is a, c, g, or t
  misc_feature (1292)..(1292): n is a, c, g, or t
  misc_feature (1294)..(1294): n is a, c, g, or t
  misc_feature (1296)..(1296): n is a, c, g, or t
  misc_feature (1298)..(1299): n is a, c, g, or t
  misc_feature (1302)..(1302): n is a, c, g, or t
  misc_feature (1304)..(1304): n is a, c, g, or t
  misc_feature (1306)..(1308): n is a, c, g, or t
  misc_feature (1310)..(1312): n is a, c, g, or t
  misc_feature (1315)..(1315): n is a, c, g, or t
  misc_feature (1317)..(1321): n is a, c, g, or t
  misc_feature (1323)..(1324): n is a, c, g, or t
  misc_feature (1326)..(1326): n is a, c, g, or t
  misc_feature (1328)..(1332): n is a, c, g, or t
  misc_feature (1334)..(1338): n is a, c, g, or t
  misc_feature (1340)..(1343): n is a, c, g, or t
  misc_feature (1348)..(1349): n is a, c, g, or t
  misc_feature (1353)..(1354): n is a, c, g, or t
atagagaaattactatgagaggatcgcatcaccatcaccatcacggatcctatttaggtgacactatagaatcgtcgacccacgcgtccggtcttcgcctttgccatcgccgcgggcgtatgcgggctcacgcagatcacgcagtaccgcagccaccctgtggacgtgtatgccggcttcctcatcggggcgggcatcgctgcctacctggcctgccacgcggtgggcaacttccaggccccacctgcagagaagcccgcggccccggcccccgccaaggacgcgctgcgggccctgacgcagcggggccacgactcggtttatcagcanaataagtcggtgagcaccgacgagctggggcccccagggcggctggagggcgcgccccggcccgtggcccgcgagaagacctcgctgggcagcctgaagcgcgccagcgtggacgtggacctgctggccccgcgcagccccatggccaaggagaacatggtgaccttcagccacacgctgcccagggccagcgcgccctcgctggacnaccccgcgcgccgccacatgaccatccacgtgccgctggacgcctcgngctccaagcagctcatcatcgagtggaagcanaanagcctggagggccgcggcctggggctgcccgacnacgccagccccgggcacctgcgcgcgcccgccgaanccatggcggaggangangaanangagangaccaanaggaanangatnangangaanangaggangannagggcccggncccgncntcnntctaccccancntgaangnggnncgggnctngggacctnngntnattcttccnancgagngnggngtcnncncnctntggtgnncatccnnnaanangnntcnnnaaanngnntcggnntttttnccnnaantttnttncnnntantnnnntnantgnttnnnnaantntnaaaaaaannnnnnnnnatttnnnaatccnttnnnnntnntnannttaannanattnaaaaaannnnnnnnnttntnnntnnantnnnnnnnannttnnnttnnnanttnnannnntnnnattnnnnannnaannnnannnnnnaanannnanntttnnaatnnnantttnnananntannnnannnnnnnntnnaannnnnntnnnnnnntnnntttatnntntntnnnntnttnntntnnnntnanntnttannnnnataatatnttttannnnnntnnnanannnntannnnnnnttntnnnnannntnantnnnnantnannnttnntntnnnanntntnantnnatntntnnntnnnatnannnnnanntntnnnnntnnnnntnnnnttaanntaann

SEQ ID NO: 29 - DNA, 1294 bp, Homo Sapiens
cactacttaaggaggagatttaactatgagaggatcgcatcaccatcaccatcacggatcctatttaggtgacactatagaatcgtcgacccacgcgtccgcagagctctccagagttcaagggctccctggcctccctctcagacagcttgggggtgtctgtcatggccaccgaccaggactcctactccaccagcagcacggaggaggagctggagcagttcagcagccccagcgtgaagaagaagccctccatgatcctgggcaaggctcggcaccggctgagctttgccagtttcagcagcatgttccacgctttcctctccaacaaccgcaagctgtacaagaaggtggtggagctggcgcaggacaagggctcgtactttggcagcctggtgcaggactacaaggtgtacagcctggagatgatggcgcgccagacctccagcacggagatgctgcaggagattcgcaccatgatgacccagctcaagagctacctgctgcagagcaccgagctcaaggccctggtggaccccgccctgcactccgaggaggagctcgaagcaattgtagagtctgccttgtacaaatgtgtcctgaagcccctgaaggaagccatcaactcatgcctgcatcagatccacagcaaggatggttcgctgcagcagctcaaggagaaccagttagtgatcctggccaccaccaccactgacctaggtgtgaccaccagcgtgccggaggtgcccatgatggagaagatcctgcagaagtttcaccagcatgcacaaggcctactcacctgagaagaagatctccatcctgctcaagacctgcaaactcatctacgactccatggtcctcggcaacccagggaagccctatggggcggatgacttcctgcctgtgctcatgtatgtgctggcccgcagcaacctcacggagaatgcttctcaatgtgagtacatgatggagctcatgggaccccgccctgcagctgggggagggtccctactatctgacactcaccttacgggggctcttgaagcacatcaagaagctacgaacaagaatcaccggtgaaccgggcagctgaagtgtggaagggtgcaggaacttccatccaccgctgggaagcgctggcgtacttcctcaacaggcctgggcctccctgccctccttcgtaacagggacttcatctgcgtgttcgtaactcagtcggaagcaactagccgaacgccttgggggatcgccgagacggactaacatccatcaggtctcctacagtgactgc

SEQ ID NO: 30 - DNA, 1414 bp, Homo Sapiens
  misc_feature (1)..(1): n is a, c, g, or t
  misc_feature (859)..(859): n is a, c, g, or t
  misc_feature (932)..(932): n is a, c, g, or t
  misc_feature (935)..(935): n is a, c, g, or t
  misc_feature (962)..(962): n is a, c, g, or t
  misc_feature (964)..(964): n is a, c, g, or t
  misc_feature (967)..(967): n is a, c, g, or t
  misc_feature (969)..(969): n is a, c, g, or t
  misc_feature (973)..(973): n is a, c, g, or t
  misc_feature (993)..(993): n is a, c, g, or t
  misc_feature (1003)..(1003): n is a, c, g, or t
  misc_feature (1009)..(1009): n is a, c, g, or t
  misc_feature (1012)..(1012): n is a, c, g, or t
  misc_feature (1035)..(1035): n is a, c, g, or t
  misc_feature (1041)..(1041): n is a, c, g, or t
  misc_feature (1045)..(1045): n is a, c, g, or t
  misc_feature (1055)..(1055): n is a, c, g, or t
  misc_feature (1095)..(1095): n is a, c, g, or t
  misc_feature (1105)..(1105): n is a, c, g, or t
  misc_feature (1116)..(1116): n is a, c, g, or t
  misc_feature (1123)..(1123): n is a, c, g, or t
  misc_feature (1128)..(1129): n is a, c, g, or t
  misc_feature (1139)..(1139): n is a, c, g, or t
  misc_feature (1150)..(1150): n is a, c, g, or t
  misc_feature (1152)..(1152): n is a, c, g, or t
  misc_feature (1167)..(1167): n is a, c, g, or t
  misc_feature (1171)..(1172): n is a, c, g, or t
  misc_feature (1174)..(1174): n is a, c, g, or t
  misc_feature (1177)..(1177): n is a, c, g, or t
  misc_feature (1179)..(1179): n is a, c, g, or t
  misc_feature (1191)..(1191): n is a, c, g, or t
  misc_feature (1193)..(1193): n is a, c, g, or t
  misc_feature (1198)..(1198): n is a, c, g, or t
  misc_feature (1207)..(1207): n is a, c, g, or t
  misc_feature (1215)..(1215): n is a, c, g, or t
  misc_feature (1236)..(1236): n is a, c, g, or t
  misc_feature (1243)..(1243): n is a, c, g, or t
  misc_feature (1246)..(1246): n is a, c, g, or t
  misc_feature (1248)..(1249): n is a, c, g, or t
  misc_feature (1254)..(1254): n is a, c, g, or t
  misc_feature (1256)..(1256): n is a, c, g, or t
  misc_feature (1268)..(1268): n is a, c, g, or t
  misc_feature (1276)..(1276): n is a, c, g, or t
  misc_feature (1278)..(1278): n is a, c, g, or t
  misc_feature (1283)..(1283): n is a, c, g, or t
  misc_feature (1285)..(1286): n is a, c, g, or t
  misc_feature (1294)..(1294): n is a, c, g, or t
  misc_feature (1299)..(1299): n is a, c, g, or t
  misc_feature (1301)..(1301): n is a, c, g, or t
  misc_feature (1303)..(1303): n is a, c, g, or t
  misc_feature (1313)..(1313): n is a, c, g, or t
  misc_feature (1325)..(1325): n is a, c, g, or t
  misc_feature (1330)..(1330): n is a, c, g, or t
  misc_feature (1337)..(1337): n is a, c, g, or t
  misc_feature (1352)..(1352): n is a, c, g, or t
  misc_feature (1365)..(1365): n is a, c, g, or t
  misc_feature (1373)..(1374): n is a, c, g, or t
  misc_feature (1376)..(1376): n is a, c, g, or t
  misc_feature (1378)..(1380): n is a, c, g, or t
  misc_feature (1383)..(1383): n is a, c, g, or t
  misc_feature (1390)..(1392): n is a, c, g, or t
  misc_feature (1404)..(1404): n is a, c, g, or t
nttagagaaattactatgagaggatcgcatcaccatcaccatcacggatcctatttaggtgacactatagaatcgtcgacccacgcgtccgccagcccccgcgcccgcccgccagcccgcccagcggtcgggtccgggcgcccgcgcagaatcagctgtctgagctgcccaggcggcgggggagcagcgagcgggcttcagcgagccgcaggaggcacaggcctgtcctgggtccccgcaggtctgcgcgtctgttgttcccagcgctctgagaggcctgaaaaggaagagcaacctgtccagaatccccgcaggaaaggaaaaggaggggaaatctcgacatggaaaaactcttcaatgaaaatgaaggaatgccttcgaatcaaggaaagatagacaatgaagaacagccaccgcacgagggaaagccagaagtagcttgtattctggaagacaagaagttagaaaacgagggaaacacagaaaacacgggcaagagagttgaggaaccgttaaaggataaagaaaagccagagagtgcgggaaaggcaaaaggagaaggaaagtcagagaggaagggaaagtcagagatgcagggaggatcaaagacagagggaaagccagagagagggggaagggcagagggtgaaggagagccagacagtgaaagagagccagagagtgagggagagccagaaagtgaaacaagggctgcaggaaagcgcccagctgaggatgatatacccaggaaagccaaaagaaaaaccaacaaggggctggctcagtacctcaagcaatataaggaagccatacatgatatgaatttcagcaatgaggacatgataagagaatttgacancatggctagggtggaggataaaaaggagaaaaagcaaacagaaattgggggcgtttttgtggatgcaaaaaanttncaggaccccttctatcctaggggttcnanggnanttcngggtggctgcagggcccccncgaagggacnctgaanacnttccttatgtgtagtgtccctgncaggcntttntcaggccatntgttttaaccttatggaaatactttgctttaaccgttccncctgctaccnaaaacgttttnacccccntgccnntgtttgcttnctctttttttncntaacaaatttttccncttnncnttncnaaaacctctttntnttggnaaaaataancccctttnatttcaaaaaaaaaaaagggnggccccnccntnnggggncnaataactttttncctgactngnccctntnnaaaatccnaaggncncnaaccctttgnttttttcaaccncgttncccgggntttttttttggaaanccccttttggganttttggcnngngnnnttnggaaaannnggttcccctttntcccggccta

SEQ ID NO: 31 - DNA, 1148 bp, Homo Sapiens
aaattcttaagggggagaatttaactatgagaggatcgcatcaccatcaccatcacggatcctatttaggtgacactatagaatcgtcgacccacgcgtccgcccacgcgtccgcgctctaccccgccgcagcggctgggacgtacggagcccgcaagtcccggcccgaggtccgaggaggcgtcctccgcccggtggcccagagggaagcggggcacggcgtcatcatgcacagttgtatcgcgcccgccgcgcgtccccggagccgcccctgagcccgaccgcgagttcgagctcagggcccgcccggccgcaccatgagccacgggcccagcccccggctggccgagtccccgcagctgtccaagggcagcctcctgaccatcctgggcagcccgtcgccggagcgcatggggcctgccgactccttgccgcccacgccgcccagcggcacgccctcgcccgggccgccgcccgcactgcccctgccccccgcgcccgcgctgctggccgacggcgactgggagagccgcgaggagctgcggctgcgggagctggaggaggcgcgggcgcgggcggcgcagatggagaagaccatgcgctggtggtcggactgcactgccaattggcgcgagaaatggagcaaggtgcgcgctgagcgcaaccgcgcgcgcgaggaggtgcgccagctgcgccagcgcctggacgcgctcaccaaggagctggcgggcgcacggcgcgagcgccaagaggcgcagggcgagtgcgaggcacggggccgcgagctggcgcggctgaggggcgcccggggggtcgccgaccagacgcgcgacggccccgagccggaagcggagcgcgagccagtgcgtgacgtcgggtccgagaggccgccaggcagccaggaactggagctggtggagagcctgctgaagagcatgcccagaggagtctgaggactgctgggaggcgcgcagcctggggggctgggggcccgcggggcagctcaggccgccaggagcgcagtcggctacctggaggacacagctgccacggaggaggaggcttcaagtgacgccctgcggctacggctggatgagtcccagaaggtgctgcctcaaggagcggagaagaataaacctgggcgttgg

SEQ ID NO: 32 - DNA, 1204 bp, Homo Sapiens
cattctttaagaggagaatttaactatgagaggatcgcatcaccatcaccatcacggatcctatttaggtgacactatagaatcgtcgacccacgcgtccgcggcaagtaacatgactaaaaagaagcgggagaatctgggcgtcgctctagagatcgatgggctagaggagaagctgtcccagtgtcggagagacctggaggccgtgaactccagactccacagccgggagctgagcccagaggccaggaggtccctggagaaggagaaaaacagcctaatgaacaaagcctccaactacgagaaggaactgaagtttcttcggcaagagaaccggaagaacatgctgctctctgtggccatctttatcctcctgacgctcgtctatgcctactggaccatgtgagcctggcacttccccacaaccagcacaggcttccacttggccccttggtcaggatcaagcaggcacttcaagcctcaataggaccaaggtgctggggtgttcccctcccaacctagtgttcaagcatggcttcctggcggcccaggccttgcctccctggcctgctggggggttccgggtctccagaaggacatggtgctggtccctcccttagcccaagggagaggcaataaagaacacaaagctgaaaaaaaaaaaaaaaaaaaagggcggccgctccctatagtgagtcgtattaagcttaattagctgagcttggactcctgttgatagatccagtaatgacctcagaactccatctggatttgttcagaacgctcggttgccgccgggcgttttttattggtgagaatccaagctagcttggcgagattttcaggagctaaggaagctaaaatgggagaaaaaaatcactggatataccaccgttgatatatcccaatggcatcgtaaagaacattttgaggcatttcagtcagttgctcaatgtacctataaccagaccgttcagctggatattacggcctttttaaagaccgtaaagaaaaataagcacaagtttattccgggctttattcacaatttctgcccgcctgatgaatgctcatcggaatttcgtatggcaatgaaagaacggtgagctgtgaatatgggatagtgttcaccttgttaacgtttcaatgagcaactgaaacgttttcatcgctctggagtgaaataccacacgacggaattttc

SEQ ID NO: 33 - DNA, 1137 bp, Homo Sapiens
aatccttaggaaggagaattactatgagaggatcgcatcaccatcaccatcacggatcctatttaggtgacactatagaatcgtcgacccacgcgtccgcggacgcgtggggccgcggctgcggccactgcgcgctactccatggacagcctgagctccgagcggtactacctccagtcccccggtcctcaggggtcggagctggctgcgccctgctcactcttcccgtaccaggcggcggctggggcgccccacggacctgtgtacccggctcctaacggggcgcgctacccctacggctccatgctgccccccggcggcttccccgcggctgtgtgcccacccgggagggcgcagttcggcccaggagccggtgcgggcagtggcgcgggcggtagcagcggcgggggcggcggcccgggcacctatcagtacagccagggggctccgctctacgggccgtaccctggagccgcagcggcgggatcttgcggaggactggggggcctgggggttccaggttctggcttccgtgcccacgtctacctgtgcaaccggcctctgtggctcaaattccaccgccaccaaactgagatgatcattacgaaacagggcaggcgcatgtttcctttcttgagcttcaacataaacggactcaatcccactgcccactacaatgtgttcgtagaggtggtgctggcggaccccaaccactggcgcttccaggggggcaaatgggtgacctgtggcaaagccgacaataacatgcagggcaacaaaatgtatgttcacccagagtctcctaatactggttcccactggatgagacaggagatttcattcgggaaattaaaactcaccaataacaaaggcgcaaataacaacaacacccagatgatagtcttacaatccttacacaaataccaaccccgactgcatattgttgaagttacagaggatggcgtggaggacttgaatgagccctcaaagacccagacttttaccttctcagaacgcaattcattgcagtgactgcctaccaaaacaccgatattactcactaagattgatcataacccctttgcaaaaggccttcagagaccactatgatttccatgttacaccgcttcagagatg

SEQ ID NO: 34 - DNA, 1212 bp, Homo Sapiens
gtccaataaagagggagaatttaactattgaggaggatcgcatcaccatcaccatcacggatcctatttaggtgacactatagaatcgtcgacccacgcgtccgccggccccgccctgggagccccgcagtgcgtcgcgccgctgcccgcatctccgaggcccgcgacgagcggggcctcacgggagctggatgctcggagcagcaaggcggccctgggggccccttccggtcccggggctgacgcctggcggcgtctccgggaacccgcgccctttcaagcgccgctggctcctgtttcacagatggagaccctgaagccccaacaagcagcctccccagcacctcccagtgactgaaaaagctggcactgggcgcccgtctcactctccacccagctcccaggctgccccacgggaccagcacctttggggagagacgagacctgaacaaacgctggggctggatccccagggtgggtcagaacagccgttgccctgaaagctggcccggacagatgcgtgcggggcgtgccaccggagctccttccagcttgcgtctggggccaccatgtcccttcctcagggcactggatccatctcttcaagctcagtggtccaggccatggtggcagaatcaccccccagggtgtgacgcctcgtccctgtcaattccacacagctgcacccggaagagctgtggccgggcgccgctctgacctgtgtgcggtcccctgaatgggtctcaggtgtcttcagaatgctgtgcaagttcattcgcaaacgtcctagaagtggaactgctgggtcaaagtgcattccccaaatgtcctgccagaggcctggtcggcagcagcctcctgcacagcccgagtcccttctgcgagagtcctggcttgtttgcagcctgcagctgggagatttgaagtcagacttccaggattgccgcatggagctgcagagggagtgagcatggggctggaggacctgccccgccggctgacactcccacagcaaggcgtgcccgccaaggaagcacctccacatccgctaggtagggtttgtctgcatcttcagtctcagtttaagtcctgcctgggaagaaaagcaaactccagaggcaatctggaatgctgtgtgctacatcctcaccgcacccagacttccctggaagacgggattggtgcggggatttgctctcaagccatatgtga

SEQ ID NO: 35 - DNA, 1143 bp, Homo Sapiens
caatttaaggagggagaattaactatgagaggatcgcatcaccatcaccatcacggatcctatttaggtgacactatagaatcgtcgacccacgcgtccgggcgccgtctgagccgcagacctgcagccgcgccgggagccccgagcagtcgggcgcgcactcgcagcgcgggcggccccccagcatgcggcacgccttgcccgggccgcactccacgccgtcgcacgaatctgcggacagaggacacgcgcgtggggccgggcgcgggagggtcccgggcgtggggccgcgcgaaggcctcggggcccctccctgcgccccttctgcagggcggaggcgggggcgccgtcccaggtcagggtcagtcggagtcggggccctcgggttcccaggggcagggctcagggtccgggcgcgggaccggtggggccgaggtccgcgctgcgcctgcgctggggggcgggggctgggctcggtgcgcgcgggccggggcgggggggggtctctgcccggaatcggggtccagcggagctacgcagccccgggccgctcctccttgcagctggctgacgtctgctcccgatgcacgcgctcttctgggaaggccggaggggccccagctgcgtcagcctggggtgttccgcccttgccaggcgcgagtctggggctgccaggaccttcccccaggaggcgtcggggagggcggggcgctggacggccctcctggcctggggagcgattccaggggagggggccccccacagccctaggcctctgaaccaggagctgccccgcagccccgctgctcagacagggatattgaggtcctgctagggaagctctctctggggtccccgcccccgctttcaatgtgaatgctcatcgcctcctaggcttatcgcatcttcccaagtcatcattttacagatggggaaactgaggccgggtcgcagctgtgagtgcaggggcccaagcacctcagtttgaagctgcagccaggactcagatgaccaaccctcctttctgtaatctgggggtcctggtaggcctctgaacacagctgtgagtttatgtgccagcctcagcttctctggtggtgtaagtggggcctgacgaggggagcctcccacttcccaaggcag

SEQ ID NO: 36 - DNA, 1261 bp, Homo Sapiens
cctttttaaagaggagaaattactatgagaggatcgcatcaccatcaccatcacggatcctatttaggtgacactatagaatcgtcgacccacgcgtccgggccgcccctcatgcccacaggcatttgtgccccggaaagtgggtgggtgccgcccttgctgtagtgaaaaagccgcttgctaaaaaagtgttgaatcctctgtttgaaacgaggccttgaattttggtgttggatcgaatccgcccaaaagagacttcccccgcttagtgaaaggccccggcaatgtcggggtgcgcccgcagaaagccatgccctataaccgggtgatggtgcctcgtgcaattaacctggtcaaccaggccctgaaccgccggaggtgttctcagatgcttatgccggcccccccacccagacctaacacgaagccagagaccaagcacagactgttggcccgggccaataaaaaggctgctggcgaaggggacatcccaacgatgacaccccctggccttcaagcccgagttaacaccgtctccaccttgtcggagaactttggagctctcttggtggtgattgcactcgacttggatcccatcgagctggttgacatctggcctgccctgcgtcacacaatgggggtcccttactgcattatctgggctggatgtagactggaacgtcgagacacatgagaatgtgtgccactgttcccttcgacccggtgaattggcaagagcacggcgctctggactgagctggtgcaagctctcacgacatcattacaatgacaccatgatatgatatccaccaccactggggtggcaacgtcctgcgacctgactgagtggcttggtatcagcccatactcgagacacgcctctcgcttcaataacttgcctctaaactggggacaaatgcatactgttgtagttttctatgcccataatgatttgctgctatcccactctgaaagatgacacaccaacatacagagaatctgaacccacctaggcatcacgcaccatgaatgatgacaccaactgcctcggggtctcccctgccctaccttgacgcctgaacatccgtaagttcgccaagcgatgtggctcccgctgtacaattctccattgtccctttatgaattcgcgttggacacttcgtcacaaagcccgttcgtaatgccctccaggaagtttttttctttggtagaacaggaaacgttcacccttgtgggtacatttcgtcgccggagtccatat

SEQ ID NO: 37 - DNA, 1147 bp, Homo Sapiens
aaatataaagaggagaaattaactatgagaggatcgcatcaccatcaccatcacggatcctatttaggtgacactatagaatcgtcgacccacgcgtccgcggacgcgtggggaggcggagcaggcgctgcggcaggagggaagatggcggacgaggagaagctgccgcccggctgggagaagcgcatgagccgcagctcaggccgagtgtactacttcaaccacatcactaacgccagccagtgggagcggcccagcggcaacagcagcagtggtggcaaaaacgggcagggggagcctgccagggtccgctgctcgcacctgctggtgaagcacagccagtcacggcggccctcgtcctggcggcaggagaagatcacccggaccaaggaggaggccctggagctgatcaacggctacatccagaagatcaagtcgggagaggaggactttgagtctctggcctcacagttcagcgactgcagctcagccaaggccaggggagacctgggtgccttcagcagaggtcagatgcagaagccatttgaagacgcctcgtttgcgctgcggacgggggagatgagcgggcccgtgttcacggattccggcatccacatcatcctccgcactgagtgagggtggggagcccaggcctggcctcggggcagggcagggcggctaggccggccagctcccccttgcccgccagccagtggccgaaccccccactccctgccaccgtcacacagtatttattgttcccacaatggctgggagggggcccttccagattgggggccctggggtccccactccctgtccatccccagttggggctgcgaccgccagattctcccttaaggaattgacttcagcaggggtgggaggctcccagacccagggcagtgtggtgggaggggtgttccaaagagaagtctggtcagcagagccgcctcgtgtcctctcccagttgctggaggcagactcgagggccgaattgtttctagttaagccacgctcctctgttcagtcgcaaagtgaacactcatgcggcccagccatggacctctgagcaacttgtgcagcacccttttcactccattaaccagatcactgcaaaaaaaaataaatacacaactaaatgtcg

SEQ ID NO: 38 - DNA, 1202 bp, Homo Sapiens
  misc_feature (922)..(922): n is a, c, g, or t
  misc_feature (940)..(940): n is a, c, g, or t
  misc_feature (966)..(966): n is a, c, g, or t
  misc_feature (972)..(972): n is a, c, g, or t
  misc_feature (976)..(976): n is a, c, g, or t
  misc_feature (988)..(988): n is a, c, g, or t
  misc_feature (990)..(990): n is a, c, g, or t
  misc_feature (1012)..(1012): n is a, c, g, or t
  misc_feature (1031)..(1031): n is a, c, g, or t
  misc_feature (1052)..(1052): n is a, c, g, or t
  misc_feature (1055)..(1055): n is a, c, g, or t
  misc_feature (1065)..(1065): n is a, c, g, or t
  misc_feature (1069)..(1069): n is a, c, g, or t
  misc_feature (1075)..(1075): n is a, c, g, or t
  misc_feature (1078)..(1078): n is a, c, g, or t
  misc_feature (1084)..(1084): n is a, c, g, or t
  misc_feature (1103)..(1103): n is a, c, g, or t
  misc_feature (1106)..(1106): n is a, c, g, or t
  misc_feature (1117)..(1117): n is a, c, g, or t
  misc_feature (1124)..(1124): n is a, c, g, or t
  misc_feature (1127)..(1127): n is a, c, g, or t
  misc_feature (1129)..(1129): n is a, c, g, or t
  misc_feature (1134)..(1134): n is a, c, g, or t
  misc_feature (1139)..(1139): n is a, c, g, or t
  misc_feature (1142)..(1142): n is a, c, g, or t
  misc_feature (1144)..(1144): n is a, c, g, or t
  misc_feature (1158)..(1158): n is a, c, g, or t
  misc_feature (1160)..(1160): n is a, c, g, or t
  misc_feature (1162)..(1162): n is a, c, g, or t
  misc_feature (1169)..(1169): n is a, c, g, or t
  misc_feature (1172)..(1172): n is a, c, g, or t
  misc_feature (1181)..(1181): n is a, c, g, or t
  misc_feature (1183)..(1183): n is a, c, g, or t
  misc_feature (1189)..(1189): n is a, c, g, or t
  misc_feature (1191)..(1191): n is a, c, g, or t
  misc_feature (1199)..(1199): n is a, c, g, or t
  misc_feature (1202)..(1202): n is a, c, g, or t
agagaaattactatgagaggatcgcatcaccatcaccatcacggatcctatttaggtgacactatagaatcgtcgacccacgcgtccgcggacgcgtggggtcgctgccgctgccgctgccactgccactgccacctcgcggatcaggagccagcgttgttcgcccgacgcctcgctgccggtgggaggaagcgagagggaagccgcttgcgggtttgtcgccgctgctcgcccaccgcctggaagagccgagccccggcccagtcggtcgcttgccaccgctcgtagccgttacccgcgggccgccacagccgccggccgggagaggcgcgcgccatggcttctggagccgattcaaaaggtgatgacctatcaacagccattctcaaacagaagaaccgtcccaatcggttaattgttgatgaagccatcaatgaggacaacagtgtggtgtccttgtcccagcccaagatggatgaattgcagttgttccgaggtgacacagtgttgctgaaaggaaagaagagacgagaagctgtttgcatcgtcctttctgatgatacttgttctgatgagaagattcggatgaatagagttgttcggaataaccttcgtgtacgcctaggggatgtcatcagcatccagccatgccctgatgtgaagtacggcaaacgtatccatgtgctgcccattgatgacacagtggaaggcattactggtaatctcttcgaggtataccttaagccgtacttcctggaagcgtatcgacccatccggaaaggagacatttttcttgtccgtggtgggatgcgtgctgtggagttcaaagtggtggaaacagatcctagcccttattgcattgttgctccagacacagtgatccactgcgaaggggagcctatcaaacgagaggatgaggaanagtccttgaatgaagtanggtatgatgacattggtggctgcagnaaccanctanctcaaataaagnanatgggggaactgcccctgaaanatcctgccctctttaaggnattggggtgaaacctcctaangantcctgctttnacgnacctcntgnaaaagnaaaaacctgattgctccanctnaacaaatgaantgaaccntcntnttttnataanggncngaaatatgaacaantngntgggganttnaaaaaaacntnttaaancntttaggangtn

SEQ ID NO: 39 - DNA, 1168 bp, Homo Sapiens
caattataagagggagaattaactatgagaggatcgcatcaccatcaccatcacggatcctatttaggtgacactatagaatcgtcgacccacgcgtccgctgcgtcgctccgggagctgccgacggacggagcgcccccgcccccgcccggccgcccgcccgccgccgccatgcccttctccaacagccacaacgcactgaagctgcgcttcccggccgaggacgagttccccgacctgagcgcccacaacaaccacatggccaaggtgctgacccccgagctgtacgcggagctgcgcgccaagagcacgccgagcggcttcacgctggacgacgtcatccagacaggcgtggacaacccgggccacccgtacatcatgaccgtgggctgcgtggcgggcgacgaggagtcctacgaagtgttcaaggatctcttcgaccccatcatcgaggaccggcacggcggctacaagcccagcgatgagcacaagaccgacctcaaccccgacaacctgcagggcggcgacgacctggaccccaactacgtgctgagctcgcgggtgcgcacgggccgcagcatccgtggcttctgcctccccccgcactgcagccgcggggagcgccgagccatcgagaagctcgcggtggaagccctgtccagcctggacggcgacctggcgggccgatactacgcgctcaagagcatgacggaggcggagcagcagcagctcatcgacgaccacttcctcttcgacaagcccgtgtcgcccctgctgctggcctcgggcatggcccgcgactggcccgacgcccgcggtatctggcacaatgacaataagaccttcctggtgtgggtcaacgaggaggaccacctgcgggtcatctccatgcagaagggggggcaacatgaaggaggtgttcacccgcttctgcaccggcctcacccagattgaaactctcttcagtctaaggactatgagttcatgtgaaccctcacctgggctacatcctccacctgctcatccaacctgggcaccgggctggcggggcagggtggtgcatatcaagctgcccaacctggggcagcatggagaagttctcggaggtgcctagcggctgcgacttcgagcgaaggcacaggcgggtggacaccggctgcgtgggtcg

SEQ ID NO: 40 - DNA, 1297 bp, Homo Sapiens
aatactttaaagagggagaattaactatgagaggatcggcatcaccattcaccatcacggatcctattttaggtgacactatagaatcgtcgacccacgcgtccgccgggcaccgcgagccggccgagctccagccggagctacgtgactacgtccacccgcacctacagcctgggcagcgcgctgcgccccagcaccagccgcagcctctacgcctcgtccccgggcggcgtgtatgccacgcgctcctctgccgtgcgcctgcggagcagcgtgcccggggtgcggctcctgcaggactcggtggacttctcgctggccgacgccatcaacaccgagttcaagaacacccgcaccaacgagaaggtggagctgcaggagctgaatgaccgcttcgccaactacatcgacaaggtgcgcttcctggagcagcagaataagatcctgctggccgagctcgagcagctcaagggccaaggcaagtcgcgcctgggggacctctacgaggaggagatgcgggagctgcgccggcaggtggaccagctaaccaacgacaaagcccgcgtcgaggtggagcgcgacaacctggccgaggacatcatgcgcctccgggagaaattgcaggaggagatgcttcagagagaggaagccgaaaacaccctgcaatctttcagacaggatgttgacaatgcgtctctggcacgtcttgaccttgaacgcaaagtggaatctttgcaagaagagattgcctttttgaagaaactccacgaagaggaatccaggagctgcaggctcagattcaggaacagcatgtccaaatcgatgtggatgtttccaagcctgacctcacggctgccctgcgtgacgtacgtcagcaatatgaaagtgtggctgccaagaacctgcaggaggcagaagaatggtacaaatcccagttttgctgacctctctgaggctgccaaccgggaacaatgacgccctgcgccaggcaaagcagagtccactgagtactcggagacaggtgcagtccctccacctgtgaagtggatgcccttaaaggaaccaattgagtccctggaacgccagaattgcgtggaaatggaagaaaacttttgccgttgtagctgctaactaccagacactaattggccgccctgccagaatgaaattcagaatatgagaaggaatggctctcgttcactcgtggatacaagacctgctcaatgtagatgccttgacatggaatgccactatacggaaagtctgctcttgaagccagaggagaatgcactgggga

SEQ ID NO: 41 - DNA, 802 bp, Homo Sapiens
tattatttagaagggaagaatttactatgagaggatcgcatcaccatcaccatcacggattcctatttaggtgacactatagaatcgtcgacccacgcgtccgcccacgcgtccgcggacgcgtgggcaaattatgctgcagcatattgtactggcctgctgctggcccgcaggcttctcaataggtttggcatggacaagatctatgaaggccaagtggaggtgactggtgatgaatacaatgtggaaagcattgatggtcagccaggtgccttcacctgctatttggatgcaggccttgccagaactaccactggcaataaagtttttggtgccctgaagggagctgtggatggaggcttgtctatccctcacagtaccaaacgattccctggttatgattctgaaagcaaggaatttaatgcagaagtacatcggaagcacatcatgggccagaatgttgcagattacatgcgctacttaatggaagaagatgaagatgcttacaagaaacagttctctcaatacataaagaacagcgtaactccagacatgatggaggagatgtataagaaagctcatgctgctatacgagagaatccagtctatgaaaagaagcccaagaaagaagttaaaaagaagaggtggaaccgtcccaaaatgtcccttgctcagaagaaggatcgggtagctcaaaagaaggcaagcttcctcagagctcaggagcgggctgctgagagctaaacccagcaattttctatgattttttcagatatagataataaacttatgaacagcaact

SEQ ID NO: 42 - DNA, 1304 bp, Homo Sapiens
attatttagaaggaagaaattacttatgagaaggatcgcatcaccatcaccatcacggatcctatttaggtgacactatagaatcgtcgacccacgcgtccgcccggaggacgtccggcctctgtgagccgcaacctttccaagggagtggttgtgtgatcgccatcttagggaaaagatgttctcgtccgtggcgcacctggcgcgggcgaaccccttcaacacgccacatctgcagctggtgcacgatggtctcggggacctccgcagcagctccccagggcccacgggccagccccgccgccctcgcaacctggcagccgccgccgtggaagagtacagttgtgaatttggctccgcgaagtattatgcactgtgtggctttggtggggtcttaagttgtggtctgacacacactgctgtggttcccctggatttagtgaaatgccgtatgcaggtggacccccaaaagtacaagggcatatttaacggattctcagttacacttaaagaggatggtgttcgtggtttggctaaaggatgggctccgactttccttggctactccatgcagggactctgcaagtttggcttttatgaagtctttaaagtcttgtatagcaatatgcttggagaggagaatacttatctctggcgcacatcactatatttggctgcctctgccagtgctgaattctttgctgacattgccctggctcctatggaagctgctaaggttcgaattcaaacccagccaggttatgccaacactttgagggatgcagctcccaaaatgtataaggaagaaggcctaaaagcattctacaagggggttgcttcctctctggatgagacagataccatacaccatgatgaaagttcgcctgctttgaacgtactgttgaagcactgtacaagtttgtggttcctaagccccgcagtgaatgttcaaaagccagagcagctggttgtaacatttgtagcaaggttacataagctggagtcttttgtgcaattgtttctcacccctgctgattctgtggtatctgtgttgaaataaagaaaaaaggtagcagttgctttctctggtcctcaggagaacttggatttaagggtgatgggaaagggaactgtttgcccgtatcatcatgaattggtacccctgacctgcactacacggggttatctatgaacttctcgtgagtctaacttcgagactttcctcgtcttcctcacggaatgccgagatctgaaagagaaagtcttggttaaacttcgatagtatgcattctgatgaagccata

SEQ ID NO: 43 - DNA, 1201 bp, Homo Sapiens
aattttaagagagaattaactatgagaggatcgcatcaccatcaccatcacggatcctatttaggtgacactatagaatcgtcgacccacgcgtccgcggacgcgtgggggagcatcccctgtccctgtgtgagcaggtggcccccatcattgacctcatggccgtcagaaatgcgctttttgccaagctccgggacttcatcaccctgcgtctgcctcctggcttcccagttaatattgaaatcccgatcttccacatcctctacggccgcatcaccttcgggaacctcaacggatgcgacgaaccggtgccatcggtgcgaggcagccccagcagcgagacgccttccccaggcagcgactcctccagcgtcggcagctccagctccacgacctcctgccgcggctgcgagatctccccagcgttgttcgaggccccgcgcggctacagcatgatgggcggccagcgggaggcggcgacccgggacgacgaccacgacctgctgcaattcgccatccagcatagcctgcttgaggcgggcagtgagtatgaccaggtcaccatctgggaggcgctaaccaacagcaagccaggcacccaccccatgtcctacgagggtcgccgacaggacaggtcagtgcccgctgggccggagagaatcctccggagaggatcctgtctcccctaagccagaacacagccggagaacccgcggggccctcggcagggaccctcctggtatcgggatggcttctgccaccactcctgcctccgaggcggcaggcaggggtcagggatccaggcttcaccgcggagttcagactctccccaggcattgacggggagaacttggtagggtctgggctccgccacgaccaggtgggggccaggacgccgcgggactgaccgcctccactagaagggtggtggccgcgggccgccctgagcctccacgccgtgtcccggccccggccgggtgggtgggtgcgcccgggagcccgcgacattccttccccaccccccaggagcgcccgcccacgccgcagcgccagcctgcgcccccggcgtcagtgcccagcctcggccagctcaggccaggtcggcggccacgtgttccggagctacgacgagcagctgcgctggcgatggactgtcgcgccagagcaggaggaaggcggcggcccgccgcgccagaagaag

SEQ ID NO: 44 - DNA, 1228 bp, Homo Sapiens
  misc_feature (776)..(776): n is a, c, g, or t
  misc_feature (814)..(814): n is a, c, g, or t
  misc_feature (825)..(825): n is a, c, g, or t
  misc_feature (838)..(838): n is a, c, g, or t
  misc_feature (873)..(873): n is a, c, g, or t
  misc_feature (920)..(920): n is a, c, g, or t
  misc_feature (944)..(944): n is a, c, g, or t
  misc_feature (955)..(955): n is a, c, g, or t
  misc_feature (966)..(966): n is a, c, g, or t
  misc_feature (990)..(990): n is a, c, g, or t
  misc_feature (1059)..(1060): n is a, c, g, or t
  misc_feature (1068)..(1082): n is a, c, g, or t
  misc_feature (1093)..(1093): n is a, c, g, or t
  misc_feature (1103)..(1103): n is a, c, g, or t
  misc_feature (1106)..(1107): n is a, c, g, or t
  misc_feature (1110)..(1111): n is a, c, g, or t
  misc_feature (1113)..(1114): n is a, c, g, or t
  misc_feature (1117)..(1117): n is a, c, g, or t
  misc_feature (1125)..(1125): n is a, c, g, or t
  misc_feature (1128)..(1128): n is a, c, g, or t
  misc_feature (1131)..(1131): n is a, c, g, or t
  misc_feature (1133)..(1133): n is a, c, g, or t
  misc_feature (1141)..(1141): n is a, c, g, or t
  misc_feature (1144)..(1144): n is a, c, g, or t
  misc_feature (1151)..(1151): n is a, c, g, or t
  misc_feature (1163)..(1165): n is a, c, g, or t
  misc_feature (1168)..(1168): n is a, c, g, or t
  misc_feature (1178)..(1178): n is a, c, g, or t
  misc_feature (1180)..(1180): n is a, c, g, or t
  misc_feature (1186)..(1186): n is a, c, g, or t
  misc_feature (1189)..(1189): n is a, c, g, or t
  misc_feature (1198)..(1198): n is a, c, g, or t
  misc_feature (1204)..(1204): n is a, c, g, or t
  misc_feature (1206)..(1207): n is a, c, g, or t
  misc_feature (1210)..(1210): n is a, c, g, or t
  misc_feature (1225)..(1225): n is a, c, g, or t
  misc_feature (1228)..(1228): n is a, c, g, or t
tagaggaaattactatgagaggatcgcatcaccatcaccattcacggatcctatttaggtgacactatagaatcgtcgacccacgcgtccgcgggcgcacgcgcgctcctggagtttcccaaccttccgggtgcgggcggggcatgttacgtcacgtcgtttaatccggaaacggcggcggcggcgacaggaccgaggggccttagttggtgggcaagtcggggatcccagaaagagaagcgtgacccggaagcggaaacgggtgtccgtcccagctccggcctgccagtgagcttctaccatcatggacctattgttcgggcgccggaagacgccagaggagctactgcggcagaaccagagggccctgaaccgtgccatgcgggagctggaccgcgagcgacagaaactagagacccaggagaagaaaatcattgcagacattaagaagatggccaagcaaggccagatggatgctgttcgcatcatggcaaaagacttggtgcgcacccggcgctatgtgcgcaagtttgtattgatgcgggccaacatccaggctgtgtccctcaagatccagacactcaagtccaacaactcgatggcacaagccatgaagggtgtcaccaaggccatgggcaccatgaacagacagctgaagttgccccagatccagaagatcatgatggagtttgagcggcaggcagagatcatggatatgaaggaggagatgatgaatgatgccattgatgatgccatgggtgatgaggaagatgaanaggagagtgatgctgtggtgtcccaggttctggatganctgggacttancctaacagatganctgtcgaacctcccctcaactgggggctcgcttantgtggctgctggtgggaaaaaagcaaaagccgcagcctcacccctanctgatgctgatgcaaactggaagnaacggcttaanaacctgcgganggactgaatgcccctgcccctccnaaataaccagtggatgcccagaatcttttaccacaaccccctctttaataaaaaaattttgacccttannaaaaaaannnnnnnnnnnnnnnaaaaggggcgncccccccctnaannggnncnnatnaacctttnttnacntnaactttgnacnccttttntaaaaatccccnnnttnccccccaaancncccccnggnatttttttnaaaaancnncgntttccccccgggggnttn

SEQ ID NO: 45 - DNA, 1268 bp, Homo Sapiens
aatctatataaagggggagaaatttactattgagaggtcgcatcaccatcaccatcacggatcctatttaggtgacactatagaatctgtcgacccacgcgtccgggaagaactggagaaaaggaaggatgaaattgaacgagaagttctccgaagggtggaggaagccaaacgcatcatggaaaagcagttgctcgaagaactcgagcgacagagacaagctgagcttgccgcacaaaaagctagagagaggaagctggcgcgtatggcagccgaggagcacactctgcaggacactggacaagacagaggaagaacgtgcaaaacgtgaggagctagagcgaatactggaagagaataaccgaaaaattgcagaagcacaagccaaactggccgaagaacagttgagaattgttgaagaacaaagaaagattcatgaggaaaggatgaaactagaacaagaacgacaacgtcaacaaaaagaagaacaaaaaattatcctgggcaaggggaagtccaggccaaaactgtccttctcattaaaaacccaggattaaattgcaaactctgaactttttacaaagaaaaatggaaaaactttgtatggtagcttcatgttgaagtggttttttgtttttgtttttgtttttttaatttgtaaaatctggaaagttagcttgttctaataggggctatgctctgcaattcccttttttttttttttttccttccactaagtcaaatccttatcagatcattgttgtattctaaggagtgacgtatttttcacctgtttggattctatattagtggtctgaggaagagcagatcacattgtaaaactatggatggtctgataaggcttttactgaccccactgacttcagagttatactctgtttgctacatcataatgctggttttgctgactttttgtttttttatatatttataaaaaaagaaaaagtggtgattgcattgggaaattcccaggtattactggacctatgtggttgtattgttaaaccagtgtcctttgtgatacctgtttgcttcttgatgtccctgatacaggtaaggaaacagtgggtcacctcctgatacaaggtattatatacagttcagtaattgctctctgttcaattttgtttttattttcattgaccaaatcaaacccagcattcccatgtgtaataatgatttggcttgaatagtaaggcttaagttcaaaatatattatacaagagtaaatatgtccgtccgctctc

SEQ ID NO: 46 - DNA, 1201 bp, Homo Sapiens
aaattttaagagagattaactatgagaggtcgcatcaccatcaccatcacggatcctatttaggtgacactatagaatcgtcgacccacgcgtccgccgcgctaaagccgctgctgccgcggaagacgatcctccagtacccgcccgccgtcaccgcagctgccgtgtcctcctcccacccctagccgcaccccctcgcggggggatcagctgagcggccaaacggcacggtcgggggagccccgagtccgcagctgcagcggggcctgagaccagagttggcgagggcaaggaaggagcggccccgggcagtgggggcggggccgggcgggcccgagaacagccgaatttggccgagcgctgccgagcgagtccgaggcgctgggccaggccggagccggactacgggagccgaggcgggccgcgcggtgggcgcggagaggagcggagcggcgcggcaggccgggcgggtggcggcagcagcggaggaggccgcagctgcgggtccgaggagcggaggcgacgcgggcggcggcggggggccgggtggccggggtcccgggccccgcggcggcggcagcggcggcggcggcggcaggatgatcaagctgttctcgctgaagcagcagaagaaggaggaggagtcggcgggcggcaccaagggcagcagcaagaaggcgtcggcggcgcagctgcggatccagaaggacataaacgagctgaacctgcccaagacgtgtgatatcagcttctcagatccagacgacctcctcaacttcaagctggtcatctgtcctgatgagggcttctacaagagtgggaagtttgtgttcagttttaaggtgggccagggttacccgcatgatccccccaaggtgaagtgtgagacaatggtctatcaccccaacattgacctcgagggcaacgtctgcctcaacatcctcagagaggactggaaagccagtccttacgataaactccataatttatgggcctgcagtatctcttcttgagcccaaccccgaggacccactgaacaggaggccgcagaggtcctgcagaacaccggcggctgtttgagcagaacgtgcagcgctccatgcggggtgctacatcgctccacctacttggagcgctgcctgaatagtggcgcataccactccgccacggccacagcctggcatcctgcaaatatttattg

SEQ ID NO: 47 - DNA, 1245 bp, Homo Sapiens
caaacttaaggagggaaaattaactatgagaggatcgcatcaccatcaccatcacggatcctatttaggtgacactatagaatcgtcgacccacgcgtccgcagtaggaagctggggcccacgggggccttcgggggcagatggcaggcaggcttggggacagaccccggagggcaggagccgggtccgccgcccctccgccggcgcctgcgcattgaggcccagctcccctctcaaccccgccccatcgcttgggttttcaaatttgaaacctgcttcttttcccgcccgaacgtgtggatcagcggcgggagagggcggggcagagcgccagccaatagggcatcagaggctccccgaccccgccccgaggatgacaacagcgatccttgagaagccatgtgcgaatgggcgagcggcggccggaggccccgcccccgcggcacccacgtgcagcggctgggcccggcgctttcaggggaccaccaggcccccagagcgccgtgctatgttgggggctagtcactagcacggggctggaagctgagatcaaagacgccaatgagccggcgtgggtggatgagtgaggcgggcaagaagcagcaccggttagcctgagtgttcgctccagggccaggcctggagccagcgcccttacctgcccctggaaagtctgagaccactcggggcggggcggctgccggagggtgggctgcggctccgtggcgggttccagaggggcggagccaagggctgggcgttcccgcgggcggggcgtcccgggggcggggcggcccctgtgtttgttgcaccgtgtcagttactttgtaacaaaagtgctgcagccgcttgctccggccggcaccctaggccggcccgccgccagctgtcgccgacatggaacccttggccagcaacatccaggtcctgctgcaggcggccgagttcctggagcgccgtgagagagtgaggaaggacccttggctgaattccgggcggcgacctcgctgacacgggcctggactggacctggctcccagctgaagatgcaccgccctaagacagtaatccgggcgcctcgccctcaactcgagagagtcccgggcgtagagcaggaccggtgggggaaatgtcctgcgctaaaggcatactgacgtgcctgtgactggctgcctctgaccaggttcagctagctgacggcggaactcctctgccagtcgaacatgataatgcgatccctgttgc

SEQ ID NO: 48 - DNA, 1262 bp, Homo Sapiens
caatttataagggggagattaactatgagaggatcgcatcaccatcaccatcacggatcctatttaggtgacactatagaatcgtcgacccacgcgtccgcctcgacaacctatcgaaggcgccatggagcgaccggcgcccctggccgtgcttcccttctcggaccccgcgcacgccctgagcctgctgcgcggcctgagccagctgcgcgccgagcgcaagttcctggacgtgaccctggaggcggcgggcgggcgcgacttcccggcgcaccgtgcggtgctggccgccgccagcccctacttccgcgccatgttcgcggggcagctgcgcgagagccgcgccgagcgggtgcgcctgcacggagtgcctcccgacatgctgcagctgctgctggacttcagctacacgggccgcgtggcggtaagcggcgacaacgctgagccgctgctgcgcgccgccgacctgctgcagttcccggccgtgaaggaggcgtgcggggccttcctgcagcagcagctcgacctggccaactgcctggacatgcaggacttcgctgaggccttcagctgctcgggactggcgagcgcggcgcagcggttcattctgcgccacgtgggcgagctgggcgccgagcagctggagcggctgccactggcgcgcctgctgcgctacctgcgggacgacgggctgtgtgtgcccaaggaggaggccgcctaccagctggcgctgcgctgggtccgcgctgacccgccgcgccgcgccgcgcactggccgcagctgctggaggccgtgcgcctgcccttcgtgcgccgcttctacctgttggcgcacgtcgaggccgagccgctggtggcgcgctgcccaccctgcctgcgcctgctgcgcgaggcgcgcgacttccaggcggcgcgctacgaccgccacgaccgcgggccctgtccccgaatgcgtcctcgcccgtccaccggtctcgccgagatcctcgtgctcgtgggcggctgcgaccaggactgtgacgagctggtcactgtcgactgctacaacccgcagacgggtcagtggcgctacctgacgagttcccagaccacctggggcggaggctacagcatcgtgacgctggcaatgacatctacgtgacgggtggatctgatggctccggctctatgactgctggtgagttacacctcaagcgttaatgatgcgagtgacccgatgctgaagcgcggagtaccacaagctcccctggtgccgtggacga

SEQ ID NO: 49 - DNA, 1157 bp, Homo Sapiens
attttttatagaaagagagaatttaactatggagaggatcgcatcaccatcaccatcacggatcctatttaggtgacactatacaatcgtcgacccacgcgtccgcgcgcacacgcacacgggcacacacgcgcgcacgggatcctgctccgctccgcggctcccccgccccggagagctccgcgatcagcacccgggacagcgccaccgcccacgtgcagggggtggggtccgggcggggctggcgcctcggcgtctcccgggagtgtcccgtccagccgccgagcagggtgcttgagtgtctctgcagaaaagactccaggaccccgccaccatgttcccggagcccccaaccccggggcctccatcgcccgacacgcctcccgactccagtcgcatcagccacggcccagtgcccccctgggccctggccaccatcgtgctggtctcaggcctcctcatcttcagctgctgtttctgtctctaccggaagagctgtcggaggcggacaggcaagaagagccaggcccaagcccaggtccaccttcaggaagtgaaggggctgggccagagttacatagacaaggtgcagccagaagtagaggagctggagccagcaccatccgggccagggcagcaggtggcagacaagcatgagctaggacgactgcagtactccctggattatgacttccagagtggccagctgctggtgggcattctgcaaagcaatgggattggcagccttggatcttggtggctcctcggacccctatgtgcgggtctacctgctgccggacaaacggaggcggtacgagaccaaggtgcatcggcagacgctgaaccctcactttggggagaccttcgccttcaaggttccctacgtggagctggggggcagggtgctggtcatggcggtgtacgacttcgaccgcttctctcgcaatgacgccatcgggggagtgcgggtccctatgagctccgtggaacctgggggcgccagtgcaggcctggcgggagctgcagcggctccgcgggagggagcagaagaagcttggggaacatctgcttctcccttccgctatgtccccacggcggggaagctcacccgtcatccgtcttgggagcttaaaaaacctggaaaaagatgggacagt

SEQ ID NO: 50 - DNA, 1410 bp, Homo Sapiens
  misc_feature (790)..(790): n is a, c, g, or t
  misc_feature (869)..(869): n is a, c, g, or t
  misc_feature (931)..(931): n is a, c, g, or t
  misc_feature (960)..(960): n is a, c, g, or t
  misc_feature (1004)..(1004): n is a, c, g, or t
  misc_feature (1013)..(1013): n is a, c, g, or t
  misc_feature (1019)..(1019): n is a, c, g, or t
  misc_feature (1034)..(1034): n is a, c, g, or t
  misc_feature (1043)..(1043): n is a, c, g, or t
  misc_feature (1061)..(1061): n is a, c, g, or t
  misc_feature (1067)..(1067): n is a, c, g, or t
  misc_feature (1070)..(1071): n is a, c, g, or t
  misc_feature (1073)..(1073): n is a, c, g, or t
  misc_feature (1079)..(1079): n is a, c, g, or t
  misc_feature (1085)..(1085): n is a, c, g, or t
  misc_feature (1090)..(1090): n is a, c, g, or t
  misc_feature (1103)..(1103): n is a, c, g, or t
  misc_feature (1119)..(1119): n is a, c, g, or t
  misc_feature (1121)..(1121): n is a, c, g, or t
  misc_feature (1126)..(1126): n is a, c, g, or t
  misc_feature (1136)..(1136): n is a, c, g, or t
  misc_feature (1140)..(1140): n is a, c, g, or t
  misc_feature (1142)..(1142): n is a, c, g, or t
  misc_feature (1148)..(1151): n is a, c, g, or t
  misc_feature (1153)..(1153): n is a, c, g, or t
  misc_feature (1155)..(1155): n is a, c, g, or t
  misc_feature (1164)..(1164): n is a, c, g, or t
  misc_feature (1168)..(1168): n is a, c, g, or t
  misc_feature (1180)..(1180): n is a, c, g, or t
  misc_feature (1183)..(1183): n is a, c, g, or t
  misc_feature (1186)..(1186): n is a, c, g, or t
  misc_feature (1188)..(1188): n is a, c, g, or t
  misc_feature (1192)..(1192): n is a, c, g, or t
  misc_feature (1194)..(1195): n is a, c, g, or t
  misc_feature (1213)..(1213): n is a, c, g, or t
  misc_feature (1215)..(1217): n is a, c, g, or t
  misc_feature (1226)..(1226): n is a, c, g, or t
  misc_feature (1229)..(1229): n is a, c, g, or t
  misc_feature (1232)..(1234): n is a, c, g, or t
  misc_feature (1237)..(1237): n is a, c, g, or t
  misc_feature (1242)..(1242): n is a, c, g, or t
  misc_feature (1260)..(1261): n is a, c, g, or t
  misc_feature (1266)..(1268): n is a, c, g, or t
  misc_feature (1279)..(1279): n is a, c, g, or t
  misc_feature (1281)..(1282): n is a, c, g, or t
  misc_feature (1284)..(1284): n is a, c, g, or t
  misc_feature (1286)..(1287): n is a, c, g, or t
  misc_feature (1289)..(1290): n is a, c, g, or t
  misc_feature (1296)..(1296): n is a, c, g, or t
  misc_feature (1311)..(1311): n is a, c, g, or t
  misc_feature (1315)..(1315): n is a, c, g, or t
  misc_feature (1317)..(1318): n is a, c, g, or t
  misc_feature (1322)..(1322): n is a, c, g, or t
  misc_feature (1327)..(1327): n is a, c, g, or t
  misc_feature (1334)..(1334): n is a, c, g, or t
  misc_feature (1339)..(1340): n is a, c, g, or t
  misc_feature (1342)..(1342): n is a, c, g, or t
  misc_feature (1347)..(1350): n is a, c, g, or t
  misc_feature (1352)..(1354): n is a, c, g, or t
  misc_feature (1361)..(1361): n is a, c, g, or t
  misc_feature (1363)..(1364): n is a, c, g, or t
  misc_feature (1373)..(1374): n is a, c, g, or t
  misc_feature (1377)..(1377): n is a, c, g, or t
  misc_feature (1380)..(1380): n is a, c, g, or t
  misc_feature (1382)..(1382): n is a, c, g, or t
  misc_feature (1389)..(1389): n is a, c, g, or t
  misc_feature (1395)..(1395): n is a, c, g, or t
  misc_feature (1398)..(1398): n is a, c, g, or t
  misc_feature (1405)..(1405): n is a, c, g, or t
  misc_feature (1409)..(1410): n is a, c, g, or t
tagagaaattactatgagaggatcgcatcaccatcaccatcacggatcctatttaggtgacactatagaatcgtcgacccacgcgtccggccgaagcggctgcatctggcgccgcgtctgccccgcgtgctcggagcggattctgcccgccgtccccggagccctcggcgccccgctgagcccgcgatcacttcctccctgtgaccaaccggcgctgcaggttagagcctggcaatgccgtttgggtgtgtgactctgggcgacaagaagaactataaccagccatcggaggtgactgacagatatgatttgggacaggtcatcaagactgaggagttttgtgaaatcttccgggccaaggacaagacgacaggcaagctgcacacctgcaagaagttccagaagcgggacggccgcaaggtgcggaaagctgccaagaacgagataggcatcctcaagatggtgaagcatcccaacatcctacagctggtggatgtgtttgtgacccgcaaggagtactttatcttcctggagctgtgagtgtgggtctggggacccaagattccccagcgcccagggctttcacctgtcccaccctctgcagctaaggaaaccccctttctggacccttggcgtcccaggtccctgtgccttgctcagccagctgcctggcgtaggcagctcacccaagtgctcctgccctacccctgattctgcccacgccaggctcaggggctggtgtccctcagggccacggggaagggaggtgtttgactggatcctggaccanggctactactcggaagcgagacacaagcaacgtggtacggcaagtcctggaggccgtggcctatttgcactcactcaanatcgtgcacaggaatctcaagctgaaaaacctggtttactacaacgggctgaaaactcgaanattgtcatcatgacttccatctggctaanctaaaaaatggcctcatcaaggaaccctgggggaacccccaaanatttgggcnaaacanggggtggggcagggncaggggaanaatggggggcaacccttnaggganctnncnttgggnaggggnaaaantgggcctctttcnaagaaacctggggggnanggaanggaacctggntagncntgaaannnnanancaaaagggncttntttttacccccnaanggnancccncnncggtatggaccccctggnannntggcccttnganctnnngtnactcngggaggaaaaagaaaacnntttcnnnaaagggggggngnngntnngnntttttngaacctccccggggntttngnncccnttttnggggggnaaaanntnaaacnnnnannnttccccnanngggggaaannttnccntnggaattncccccnccncccgggngggnn

SEQ ID NO: 51 - DNA, 1303 bp, Homo Sapiens
ccttctttaagaagggagaaaattaaactatgagaggatcgcatcaccatcaccatcacggatcctatttaggtgacactatagaatcgtcgacccacgcgtccggcacagcctgtacatgttccaccccaccctgccgcgcgtgctgctggagctggccaatgtctctacccacattgtcgcctttgacgccgtcctgtttgagccaagccgccacgccgcctacatccttctgacaggcccggcagactcagaggcacccggcctggtctctgtgatcaagcacaaggtgcgggaccttgtcccaagcagcagggtggtccgcctgggtgagggtgggccagacagtgaccaagccatcagggaccggttctcccggctgcggtaccagagtgaggcgtagaggcacgccagccagagcctgtggagagactccgcctgctgacactaaacgtcctgggaagtgggcccttccctgggtctctgcactgactcccccactcctgaccctggtgatggtcgccactgggcagcagcagccttaccagtcctccatgatcacacccagggacctgcatgggtgaggggacaccctgggcctctctcccgcccagcatcctccctgagtccccacacagggcctcactctgcaccccaccagggtcccgctcacaccaggcagccttcatagtggtctccctggccaccttgggcagagctgggtcatgcagcaccccatccttacccggtgccctctccttgccagcttctccccaggccagagcggccatcgcgtagaaagaaccagggtgtccccgggacaggccgtcccccaccccatcctgtagaagtccattccccttttccctcctgtgctctgtcccccaaggagtcatggaactcagggtactgggcctcaacgggaacctgagacagctccagcttcgcagccctttccgggagctacagggggatccttctagcatggggggtgtgacttggttcctttgaccaggtcctgttgaggaagtctggagcagggtcttccccagcaggatgggtgggggcttgctctggagcttgagcccgttgccgctcacaggtggtccttatggtgttgcagctgtctactgcttgtcatggtgcttgtgaatattcccaagggaactgcctgtggtatggcgtgtttggttcagtcttgtgacttctcagttaaaccatgagctgcctcttgtcctgaaagactggccaggcatgcagggcctggcccttctccatttcggggtgtcttacacgagcatca

SEQ ID NO: 52 - DNA, 1260 bp, Homo Sapiens
aattcatagggagggagattaactatgagaggatcgcatcaccatcaccatcacggatcctatttaggtgacactatagaatcgtcgacccacgcgtccgcccacgcgtccggggaagctcgccttacaactccgcgcggcctcggtcccctgcgccgcccgccccacaacaaaactcagcgcagcgctcccgggcgcccggttcagagcgacctgcggctcagagcggaggggagactgaccggagcgcggatcgggacagcggccgggacagcggcgagacgcgcgtgtgtgagcgcgccggaccaagcgggcccagaagcgggtctgcagcccagagggcaccttctgcaaacatgtctgtggatcccctatccagcaaagctctaaagatcaagcgagagctgagcgagaacacgccgcacctgtcggacgaggcgctgatggggctgtcggtgcgcgagctgaaccggcatctgcgcgggctctccgccgaggaggtgacacggctcaagcagcggcgccgcacactcaaaaaccgtggctacgccgccagctgccgcgtgaagcgcgtgtgccagaaggaggagctgcagaagcagaagtcggagctggagcgcgaggtggacaagctggcgcgcgagaacgccgccatgcgcctggagctcgacgcgctgcgcggcaagtgcgaggcgctgcagggcttcgcgcgctccgtggccgccgcccgcgggcccgccacgctcgtggcgccggccagcgtcatcaccatcgtcaagtccaccccgggctcggggtctggccccgcccacggcccggaccccgcccacggcccggcctcctgctcctagtgcccgcccccgccatgcctcagccacgcccctccggcctcagctccctccccaaagtgcctgagcgccgcctctgtgcccaggtcccatttctctgcagcactggccccttggtgcacacacattcccttcgtgggccctgtcttcctcttgcagccccccaaactgggaccgaatgaccctgggaagggaacttggtagttgggatggggcagaggtctggaatctgggatcgcccttgctgaaagtttagccttttagaatgaaaagatacaggagcgctaaagaacagctggtggggagaagagggcaacccctcaatctgaactggactctattgtgcatatgcctcacatccagatcaagctagtggccgtcctgtagactacggaaaccgttcacgtactga

SEQ ID NO: 53 - DNA, 1272 bp, Homo Sapiens
attccatagaaaggagaattaactatgagaggatcgcatcaccatcaccatcacggatcctatttaggtgacactatagaatcgtcgacccacgcgtccggggtgcgggtcgctatggcggtggacatcacgctgctattccgggccagcgtcaagaccgtgaagacgcggaacaaggcgctgggagtggcggtgggcggcggggtcgatggcagccgggacgagctgttccgccggagcccccggcccaagggcgacttctccagccgggcccgcgaagtgatttctcacattggcaaactgagagattttcttctggaacacaggaaagattatattaatgcttatagccataccatgtctgaatatgggaggatgacagacacagaacgagaccagatagaccaggatgcccagatattcatgaggacctgttcagaagcaattcagcaactacgaacagaagctcacaaggagatacattcccagcaagtgaaggagcacaggaccgctgttttggatttcattgaagattacttgaaaagagtatgtaaactttactcagaacagagagccatccgagttaaaagagtggtggataagaaaagattatctaagctggaaccagaaccaaatacaaagacaagagaatccacatcttctgagaaagtttcacagagtccttcaaaagactctgaagaaaaccctgccactgaagaacgtccagaaaaaattttggctgaaacacaacctgaattgggaacgtggggagatggcaaaggcgaagatgagttatccccagaagaaatacaaatgtttgaacaggaaaatcagcgactaattggtgaaatgaacagcttgtttgatgaagtgaggcaaatcgaagggagagtggttgagatttccagactccaagagatattcacggaaaaggttttgcaacaggaagctgagattgacagcattcaccagttagttgtgggggcaactgaaaatatcaagggaaggcaacgaagacataagagaggccattaaaacaacgctggcttccgcgtgtgatcctcttcttcctcgtgatgtgctccttcctccttgctcttctcgactgtacgacagctagcagggccacgggggtccagcacgaaaagtcctcattgcactcaccagaactgctgccttcatgtaccttcaagttctgggacatggatgaactgaatttattccaggtgccaattggaagggcaaagaagtttcgagaactggaacgtgaat

SEQ ID NO: 54 - DNA, 1259 bp, Homo Sapiens
gtccattaagaggagaaaattaactatgagaggatcgcatcaccatcaccatcacggatcctatttaggtgacactatagaatcgtcgacccacgcgtccgcggacgcgtgggtgagctgctgccgccgccgcctctgtcgtcgtcgcgagtgtggagtcgggactggagctgctgccgcggcgacgccggggatctttgtcgctagctcccggcccttctgccccgccgccttccctcagtcagcgttgcccactcctctccggccgggcgcccctgcctccatttctcgctctctgtccaccacacacacggcccccccgatcatggatccgggcagtggcggcggcggcggcggcggcggcggcggcgggagcagcagcggcagcagcagcagcgactcggcgcctgactgctgggaccaggcggacatggaagcccccgggccgggcccttgcggcggcggcggctccctggcggcggcggccgaggcccagcgggagaacctcagcgcggccttcagccggcaactcaacgtcaacgccaagcccttcgtgcccaacgtccacgccgccgagttcgtgccgtccttcctgcggggcccggcagcgccgccacccccagctggcggcgccgccaataaccacggagccggcagcggcgcgggaggccgtgcggcacctgtggaatcctctcaagaggaacagtcattgtgtgaaggttcaaattcagctgttagcatggaactttcagaacctattgtagaaaatggagagacagaaatgtctccagaagaatcatgggagcacaaagaagaaataagtgaagcagagccagggggtgggttccttgggagatggaaggccgccagaggaaagtgcccatgaaatgatggaggaggaagaggaaatcccaaaacctaaagtctgtggttgcaccgccaggtgctcctaagaaaggagcatgtaaatgtagtattcatttgggcacgtagatgctggcaagtcaaccatttggaggacaataattgtattttgactggaatggttgacaaaggacgcttgaaaagttatgaaagagaagctaagagaaaacggatgaacttggttaccttgtcttggcctagacccattcaagagacgagacaaggtaaacggtagagtggttctgctattggaatcggaagagcattccaattccaattctggccaaagtttgttcaaatatggattgggtgggtcctctctcagctgtaatttg

SEQ ID NO: 55 - DNA, 1268 bp, Homo Sapiens
acttctttaagggggagaaatttaactatgagaggatcgcatcaccatcaccatcacggatcctatttaggtgacactatagaatcgtcgacccacgcgtccgcccacgcgtccgggcagcggggcttttgggactatatccggctggcctgcagcaaagtgcccaacaactgtgtgagcagcatcgagaacatggagaacatcagcacagcccgggccaagggccgggcatggatccgggtggcactgatggagaagcgcatgtcagaatacatcaccacggctctgcgtgacacccggaccaccagacggttctatgactctggagccatcatgctgcgggatgaagccaccatcctcaccggaatgctgatcggactgagcgccatcgacttcagcttctgtctaaagggggaagtcctggacgggaagacccccgtggtcatcgattacacgccctacctaaagttcacgcagagctacgactacctgacggacgaggaggagcggcacagcgccgagagcagcacccgtacctcccgctcgtcaccgacgaggacagctggtacagcaagtggcacaagatggagcagaagttccgcatcgtctacgcgcagaagggctacctggaggagctggtgcgtctgcgcgagtcgcagctgaaggacctggaggcggagaaccggcggcttcagctgcagctggaggaggcggcggcgcagaaccagcgcgagaaacgggagctggaaggcgtgatcctggagctgcaggagcagctgacaggtctgatccccagtgaccacgcccctctggcccagggttccaaggagctcactacacccctggtcaatcaatggccctcactgggaaacgcttaatggggccgagggcgccagcaactccaagctctaccggagacacagcttcatgagcacggagccgctgtcagctgaagccagtctgagctcggactcccagcgcctggagagggcacgcgggacgaggagccctggggtccatcgggagctcagagccaaattagtggcctcccttcgagcgattgcccaggacttcacgcattgcacttggttgacctcatccctggccttcaccttgggtttttccatctagtcctccctatgctgatatcctgtcttttctttttatagcacacactgcattgatgaccctagatcttctttggaaacatgcagctggtcatgtacctatcactgtgtttgaattgtctgggtgtcctgtttcgacag

SEQ ID NO: 56 - DNA, 1167 bp, Homo Sapiens
aattttttaagaaggagaattaactatgagaggatcgcatcaccattcaccatcacggatcctatttaggtgacactatagaatcgtcgacccacgcgtccggccagctgtgcgaccacgcgtgctcgcaggccagcaagctcaagcgccacatgaagacgcacatgcacaaggccggctcgctggccggccgctccgacggtgacttccgccaccacgagagcgacccgtcgctgggccacgagccggaggaggaggacgaggaggaggaggaggaggaggaggagctgctactggagaacgagagccggcccgagtcgagcttcagcatggactcggagctgagccgcaaccgcgagaacggcggtggtggggtgcccggggtcccgggcgcggggggcggcgcggccaaggcgctggctgacgagaaggcgctggtgctgggcaaggtcatggagaacgtgggcctaggcgcactgccgcagtacggcgagctcctggccgacaagcagaagcgcggcgccttcctgaagcgtgcggcgggcggcggggacgcgggcgacgacgacgacgcgggcggctgcggggacgcgggcgcgggcggcgcggtcaacgggcgcgggggcggcttcgcgccaggcaccgagcccttccccgggctcttcccgcgcaagcccgcgccgctgcccagccccgggctcaacagcgccgccaagcgcatcaaggtggagaaggacctggagctgccgcccgccgcgctcatcccgtccgagaacgtgtactcgcagtggctggtgggctacgcggcgtcgcggcacttcatgaaggaccccttcctgggcttcacggacgcacgacagttcgccctttcgccacgtcgtccgagcactcgtccgagaacgggcagcctgcgcttctccacgccgcccggggacctgctggacggcggcctcttcgggccgcagcggccacggcagcggaggcagcacccctgcacctgggcggcccgggccccgggcggcccagcttccaaggagggccgccgcagcgacacgtgcgagtacctgcggcaaggggttccagaacctgcaccaacttgacggtgcaccgcggagtccactcggcgagcgacccttacaatggcgagacgtgggcaactacgcgagg

SEQ ID NO: 57 - DNA, 1087 bp, Homo Sapiens
catatttaattagggagaaattaactatgagaggatcgcatcaccatcaccatcacggatcctatttaggtgacactatacaatcttcgacccacgcgtccgcccacgcgtccgctttggaaaagaaaaccattgagtgggctgaagagattaagaaaatcgaagaagccgagcgggaagcagagtgcaaaattgcggaagcagaagctaaagtgaattctaagagtggcccagagggcgatagcaaaatgagcttctccaagactcacagtacagccacaatgccacctcctattaaccccatcctcgccagcttgcagcacaacagcatcctcacaccaactcgggtcagcagtagtgccacgaaacagaaagttctcagcccacctcacataaaggcggatttcaatcttgctgactttgagtgtgaagaagacccatttgataatctggagttaaaaactattgatgagaaggaagagctgagaaatattctggtaggaaccactggacccattatggctcagttattggacaataacttgcccaggggaggctctgggtctgtgttacaggatgaggaggtcctggcatccttggaacgggcaaccctagatttcaagcctcttcataaacccaatggctttataaccttaccacagttgggcaactgtgaaaagatgtcactgtcttccaaagtgtccctcccccctatacctgcagtaagcaatatcaaatccctgtctttcccccaaacttgactctgatgacagcaatcagaagacagcccaagctggcgagcactttccatagcacatcctgcctccgcaaatggcacgttccagaattccctaaagccttccacccaagcagtgccagtgagctcaatgggcatcacacctcttgggctttcagccttgaacttgggacagtggcacagagatgccagcccctgaccatccttccagatgccttccctctctgttttgtctggtgtgcacagaaggaatcattcacctccaaatactgggtcccaccggtcaccccctcttaatttcctcagtgtccacaagtgcctcaacaatgc

SEQ ID NO: 58 - DNA, 1206 bp, Homo Sapiens
atacatttaagagggagaattaactatgagaggatcgcatcaccatcaccatcacggatcctatttaggtgacactatagaatcgtcgacccacgcgtccgcccacgcgtccgcccacgcgtccgcaacgaggacgggggagtgcgactgcgtctcgggcagcatggccgagaagcggcacacacgggactccgaagcccagcggctccccgactccttcaaggacagccccagtaagggccttggaccttgcggatggattttggtggcgttctcattcttattcaccgttataactttcccaatctcaatatggatgtgcataaagattataaaagagtatgaaagagccatcatctttagattgggtcgcattttacaaggaggagccaaaggacctggtttgttttttattctgccatgcactgacagcttcatcaaagtggacatgagaactatttcatttgatattcctcctcaggagatcctcacaaaggattcagtgacaattagcgtggatggtgtggtctattaccgcgttcagaatgcaaccctggctgtggcaaatatcaccaacgctgactcagcaacccgtcttttggcacaaactactctgaggaatgttctgggcaccaagaatctttctcagatcctctctgacagagaagaaattgcacacaacatgcagtctactctggatgatgccactgatgcctggggaataaaggtggagcgtgtggaaattaaggatgtgaaactacctgtgcagctccagagagctatggctgcagaagcagaagcgtcccgcgaggcccgcgccaaggttattgcagccgaaggagaaatgaatgcatccagggctctgaaagaagcctccatggtcatcactgaatctcctgcagcccttcagctccgatacctgcagacactgaccaccattgctgctgagaaaaactcaacaattgtcttccctctgcccatagatatgctgcaaggaatcataggggcaaaacacagccatctaggctagtgtagagatgagcgctagccttccaagcatgagtcggggactaattagcctttactcataaagaagagtaggctttttctttttccatatgtcaaattgttgtgtcccaggatgtatagcaggtataaaatagtgaaagaattgttagccttgtaaatacctggaagaattgatgt

SEQ ID NO: 59 - DNA, 1286 bp, Homo Sapiens
  misc_feature (812)..(812): n is a, c, g, or t
  misc_feature (872)..(872): n is a, c, g, or t
  misc_feature (876)..(876): n is a, c, g, or t
  misc_feature (926)..(926): n is a, c, g, or t
  misc_feature (932)..(932): n is a, c, g, or t
  misc_feature (936)..(936): n is a, c, g, or t
  misc_feature (946)..(946): n is a, c, g, or t
  misc_feature (961)..(961): n is a, c, g, or t
  misc_feature (982)..(982): n is a, c, g, or t
  misc_feature (991)..(991): n is a, c, g, or t
  misc_feature (995)..(995): n is a, c, g, or t
  misc_feature (1003)..(1003): n is a, c, g, or t
  misc_feature (1016)..(1016): n is a, c, g, or t
  misc_feature (1033)..(1033): n is a, c, g, or t
  misc_feature (1045)..(1045): n is a, c, g, or t
  misc_feature (1053)..(1055): n is a, c, g, or t
  misc_feature (1058)..(1058): n is a, c, g, or t
  misc_feature (1069)..(1069): n is a, c, g, or t
  misc_feature (1072)..(1072): n is a, c, g, or t
  misc_feature (1082)..(1082): n is a, c, g, or t
  misc_feature (1090)..(1090): n is a, c, g, or t
  misc_feature (1093)..(1093): n is a, c, g, or t
  misc_feature (1095)..(1095): n is a, c, g, or t
  misc_feature (1102)..(1102): n is a, c, g, or t
  misc_feature (1110)..(1110): n is a, c, g, or t
  misc_feature (1116)..(1116): n is a, c, g, or t
  misc_feature (1124)..(1124): n is a, c, g, or t
  misc_feature (1135)..(1136): n is a, c, g, or t
  misc_feature (1139)..(1139): n is a, c, g, or t
  misc_feature (1148)..(1148): n is a, c, g, or t
  misc_feature (1162)..(1163): n is a, c, g, or t
  misc_feature (1166)..(1166): n is a, c, g, or t
  misc_feature (1168)..(1169): n is a, c, g, or t
  misc_feature (1171)..(1172): n is a, c, g, or t
  misc_feature (1177)..(1177): n is a, c, g, or t
  misc_feature (1179)..(1179): n is a, c, g, or t
  misc_feature (1188)..(1190): n is a, c, g, or t
  misc_feature (1193)..(1193): n is a, c, g, or t
  misc_feature (1196)..(1196): n is a, c, g, or t
  misc_feature (1199)..(1199): n is a, c, g, or t
  misc_feature (1207)..(1207): n is a, c, g, or t
  misc_feature (1214)..(1214): n is a, c, g, or t
  misc_feature (1218)..(1221): n is a, c, g, or t
  misc_feature (1224)..(1227): n is a, c, g, or t
  misc_feature (1229)..(1229): n is a, c, g, or t
  misc_feature (1231)..(1231): n is a, c, g, or t
  misc_feature (1233)..(1238): n is a, c, g, or t
  misc_feature (1243)..(1245): n is a, c, g, or t
  misc_feature (1248)..(1250): n is a, c, g, or t
  misc_feature (1257)..(1257): n is a, c, g, or t
  misc_feature (1259)..(1259): n is a, c, g, or t
  misc_feature (1261)..(1261): n is a, c, g, or t
  misc_feature (1267)..(1268): n is a, c, g, or t
  misc_feature (1270)..(1270): n is a, c, g, or t
  misc_feature (1280)..(1280): n is a, c, g, or t
  misc_feature (1283)..(1286): n is a, c, g, or t
tagagaaattactatgagaggatcgcatcaccatcaccatcacggatcctatttaggtgacactatagaatcgtcgacccacgcgtccgagccgccatcttgtgggagcaaaaccaacgcctggctcggagcagcagcctctgaggtgtccctggccagtgtccttccacctgtccacaagcatggggaacatcttcgccaacctcttcaagggcctttttggcaaaaaagaaatgcgcatcctcatggtgggcctggatgctgcagggaagaccacgatcctctacaagcttaagctgggtgagatcgtgaccaccattcccaccataggcttcaacgtggaaaccgtggagtacaagaacatcagcttcactgtgtgggacgtgggtggccaggacaagatccggcccctgtggcgccactacttccagaacacacaaggcctgatcttcgtggtggacagcaatgacagagagcgtgtgaacgaggcccgtgaggagctcatgaggatgctggccgaggacgagctccgggatgctgtcctcctggtgttcgccaacaagcaggacctccccaacgccatgaatgcggccgagatcacagacaagctggggctgcactcactacgccacaggaactggtacattcaggccacctgcgccaccagcggcgacgggctctatgaaggactggactggctgtccaatcagctccggaaccagaagtgaacgcgacccccctccctctcactcctcttgccctctgctttactctcatgtggcaaaacgtgcggctcgtggtgtgagtgccanaagctgcctccgtggttttggtcaccgtgtgcatcgcaccgtgctgtaaatgtggcaaangcancctgcggcccaggctttttatttaatgtaaatagtttttgtttccaatgnaggcantttnctggtactcnatgcaatattactcncttttttttattgtaaaaaanaaaaatcanctcnctgttcanggctgaaaagggnatgtaggcccatgggcncctggcctccanaatccttnnnttnggaaaaaccgnccncccccttggnttttaaantgngnttgaaanccattttngggggngggttttnaaccaaacccnnggnatttttttnaaaaaattaaaaannccnanncnnaaaancnttgaacccnnnaanggnaancccccccnaaaaaantttnnnntannnncngnannnnnntcccnnnccnnnttttccncngnaaaaannangggggggggnccnnnn

SEQ ID NO: 60 - DNA, 1205 bp, Homo Sapiens
cttattaggaggagaaattactatgagaggatcgcatcaccatcaccatcacggatcctatttaggtgacactatagaatcgtcgacccacgcgtccggttatcatcaacaagaccagcagcaccagaattcagtttgctcccaggaaagcctttttgtggaaaacagtaggctcttggaagacagtaacatatgcaatgagacctataagaaaagacagctctttcggggcaacagagatggctcagggagaacatctgggagtcgacagagcagctcagaaaatgaactcaagtggtctgaccaccaaagggcctggagcagcacagactccgacagttccaaccgcaatctaaagcccgccatgaccaagacggcgagttttgggggcatcacggtgctgaccaggggtgacagcacttccagtactaggagtaccgggaagctgtccaaagcaggttccgagtcttccagcagtgcaggctcctcaggatcgctgtcccgcacccatccacctctccagagcacacccctagtctcaggtgtggcagctggctctccaggctgtgtgccttatccagagaatggaatagggggccaggttgctcccagcagcaccagctacatcctccttccacttgaagctgcaacaggcatcccgcctggaagcatccttcttaatccacacacaggccagccctttgtgaatcccgatggaactcctgcaatatacaacccacccaccagtcagcagcccctgcgaagcgccatggtggggcagtcccaacagcagccaccacagcagcagccctccccgcagccccaacagcaggtccagccaccgcagccacagatggcaggccctctggtcactcagtctgtccaggggctgcaggcttcctcccagtcagtgcaatatccagcagtctcttttcctccccagcacctcctacctgtgtctccaacgcagcactttcccatgagagatgatgtggcaacacagtttggccagatgaccctgagccggcagtcctcgggggagactcctgaaccccatcagtctgtctaccatcctccccttatgccacaggccgcccagcagctcagctatgtaaatcggctctacagcagccagctctaacaggagatctcaggctctgcccgtccatctccaagcagtcctcagccctccttcctttaggtca

SEQ ID NO: 61 - DNA, 1200 bp, Homo Sapiens
  misc_feature (1)..(1): n is a, c, g, or t
  misc_feature (726)..(726): n is a, c, g, or t
  misc_feature (782)..(782): n is a, c, g, or t
  misc_feature (830)..(830): n is a, c, g, or t
  misc_feature (861)..(861): n is a, c, g, or t
  misc_feature (900)..(900): n is a, c, g, or t
  misc_feature (908)..(908): n is a, c, g, or t
  misc_feature (920)..(920): n is a, c, g, or t
  misc_feature (932)..(932): n is a, c, g, or t
  misc_feature (956)..(956): n is a, c, g, or t
  misc_feature (968)..(968): n is a, c, g, or t
  misc_feature (970)..(970): n is a, c, g, or t
  misc_feature (978)..(978): n is a, c, g, or t
  misc_feature (999)..(999): n is a, c, g, or t
  misc_feature (1016)..(1016): n is a, c, g, or t
  misc_feature (1034)..(1034): n is a, c, g, or t
  misc_feature (1075)..(1075): n is a, c, g, or t
  misc_feature (1080)..(1080): n is a, c, g, or t
  misc_feature (1082)..(1082): n is a, c, g, or t
  misc_feature (1103)..(1103): n is a, c, g, or t
  misc_feature (1105)..(1105): n is a, c, g, or t
  misc_feature (1125)..(1125): n is a, c, g, or t
  misc_feature (1130)..(1130): n is a, c, g, or t
  misc_feature (1136)..(1136): n is a, c, g, or t
  misc_feature (1139)..(1139): n is a, c, g, or t
  misc_feature (1150)..(1150): n is a, c, g, or t
  misc_feature (1165)..(1165): n is a, c, g, or t
  misc_feature (1169)..(1169): n is a, c, g, or t
  misc_feature (1173)..(1173): n is a, c, g, or t
  misc_feature (1180)..(1181): n is a, c, g, or t
  misc_feature (1185)..(1185): n is a, c, g, or t
  misc_feature (1196)..(1196): n is a, c, g, or t
naaatagagaaattactatgagaggatcgcatcaccatcaccatcacggatcctatttaggtgacactatagaatcgtcgacccacgcgtccgagcggatcgcgggctcgggctgcggggctccggctgcgggcgctgggccgcgaggcgcggagcttgggagcggagcccaggccgtgccgcgcggcgccatgaagggcaaggaggagaaggagggcggcgcacggctgggcgctggcggcggaagccccgagaagagcccgagcgcgcaggagctcaaggagcagggcaatcgtctgttcgtgggccgaaagtacccggaggcggcggcctgctacggccgcgcgatcacccggaacccgctggtggccgtgtattacaccaaccgggccttgtgctacctgaagatgcagcagcacgagcaggccctggccgactgccggcgcgccctggagctggacgggcagtctgtgaaggcgcacttcttcctggggcagtgccagctggagatggagagctatgatgaggccatcgccaatctgcagcgagcttacagcctggccaaggagcagcggctgaacttcggggacgacatccccagcgctcttcgaatcgcgaagaagaagcgctggaacagcattgaggagcggcgcatccaccaggagagcgagctgcactcctacctctccaggctcattgccgcggagcgtgagagggagctggaanagtgccagcgaaaccacgagggtgatgaggacgacagccacgtccgggcccagcangcctgcattgaggccaagcacgacaagtacatggcggacatggacganctttttttctcaggtggatgaaaaaaggaanaagcgagacatcccccgactacctgtgtggcaagatcancttttganctgatgcggganccgtgcatcacncccaagtggcatcacctacaaccncaaggaaattcnangaaacacntgcagcgtgtgggttattttnacccccttaaccggaanccccttaaccaagaaaanctcatccccactttggttttaaagaagttattgacccattnttttntnaaaatggctgggtggaaaaananttaagtttccctgccctaantgggnccttgntcnagggaaccctngggaaaaacccccgncccntaanaaatttnntttnttggccccccnaacc

SEQ ID NO: 62 - DNA, 1422 bp, Homo Sapiens
  misc_feature (1)..(1): n is a, c, g, or t
  misc_feature (758)..(758): n is a, c, g, or t
  misc_feature (874)..(874): n is a, c, g, or t
  misc_feature (923)..(923): n is a, c, g, or t
  misc_feature (931)..(931): n is a, c, g, or t
  misc_feature (937)..(937): n is a, c, g, or t
  misc_feature (959)..(959): n is a, c, g, or t
  misc_feature (969)..(969): n is a, c, g, or t
  misc_feature (981)..(981): n is a, c, g, or t
  misc_feature (992)..(992): n is a, c, g, or t
  misc_feature (995)..(995): n is a, c, g, or t
  misc_feature (1015)..(1015): n is a, c, g, or t
  misc_feature (1020)..(1020): n is a, c, g, or t
  misc_feature (1022)..(1022): n is a, c, g, or t
  misc_feature (1029)..(1030): n is a, c, g, or t
  misc_feature (1037)..(1037): n is a, c, g, or t
  misc_feature (1042)..(1042): n is a, c, g, or t
  misc_feature (1047)..(1048): n is a, c, g, or t
  misc_feature (1050)..(1050): n is a, c, g, or t
  misc_feature (1055)..(1055): n is a, c, g, or t
  misc_feature (1058)..(1058): n is a, c, g, or t
  misc_feature (1064)..(1065): n is a, c, g, or t
  misc_feature (1071)..(1072): n is a, c, g, or t
  misc_feature (1077)..(1077): n is a, c, g, or t
  misc_feature (1105)..(1105): n is a, c, g, or t
  misc_feature (1126)..(1126): n is a, c, g, or t
  misc_feature (1136)..(1136): n is a, c, g, or t
  misc_feature (1144)..(1144): n is a, c, g, or t
  misc_feature (1148)..(1148): n is a, c, g, or t
  misc_feature (1152)..(1152): n is a, c, g, or t
  misc_feature (1156)..(1156): n is a, c, g, or t
  misc_feature (1162)..(1162): n is a, c, g, or t
  misc_feature (1172)..(1172): n is a, c, g, or t
  misc_feature (1175)..(1176): n is a, c, g, or t
  misc_feature (1182)..(1182): n is a, c, g, or t
  misc_feature (1184)..(1184): n is a, c, g, or t
  misc_feature (1193)..(1193): n is a, c, g, or t
  misc_feature (1201)..(1201): n is a, c, g, or t
  misc_feature (1203)..(1204): n is a, c, g, or t
  misc_feature (1207)..(1207): n is a, c, g, or t
  misc_feature (1215)..(1215): n is a, c, g, or t
  misc_feature (1227)..(1228): n is a, c, g, or t
  misc_feature (1240)..(1240): n is a, c, g, or t
  misc_feature (1244)..(1245): n is a, c, g, or t
  misc_feature (1249)..(1249): n is a, c, g, or t
  misc_feature (1253)..(1253): n is a, c, g, or t
  misc_feature (1260)..(1260): n is a, c, g, or t
  misc_feature (1267)..(1268): n is a, c, g, or t
  misc_feature (1271)..(1272): n is a, c, g, or t
  misc_feature (1277)..(1277): n is a, c, g, or t
  misc_feature (1285)..(1285): n is a, c, g, or t
  misc_feature (1289)..(1289): n is a, c, g, or t
  misc_feature (1293)..(1293): n is a, c, g, or t
  misc_feature (1297)..(1297): n is a, c, g, or t
  misc_feature (1304)..(1304): n is a, c, g, or t
  misc_feature (1308)..(1309): n is a, c, g, or t
  misc_feature (1312)..(1312): n is a, c, g, or t
  misc_feature (1318)..(1318): n is a, c, g, or t
  misc_feature (1321)..(1321): n is a, c, g, or t
  misc_feature (1337)..(1337): n is a, c, g, or t
  misc_feature (1344)..(1344): n is a, c, g, or t
  misc_feature (1357)..(1357): n is a, c, g, or t
  misc_feature (1362)..(1362): n is a, c, g, or t
  misc_feature (1376)..(1376): n is a, c, g, or t
  misc_feature (1378)..(1378): n is a, c, g, or t
  misc_feature (1389)..(1389): n is a, c, g, or t
  misc_feature (1400)..(1401): n is a, c, g, or t
  misc_feature (1405)..(1405): n is a, c, g, or t
  misc_feature (1414)..(1414): n is a, c, g, or t
  misc_feature (1418)..(1419): n is a, c, g, or t
  misc_feature (1422)..(1422): n is a, c, g, or t
naattagagaaattactatgagaggatcgcatcaccatcaccatcacggatcctatttaggtgacactatagaatcgtcgacccacgcgtccgctgtggctgatcggaagcagcctgttcctccaggacgtgctgcgcgttcaagccagtctccaaaaaagccgttcaatagtattattgagcatctgtcagtggtattcccatgttacaacagcactgagcttgctggttttattaaaaaagtgcgaagcaaaaacaagaactcactctcaggattgagtattgatgaaattgtccaaagagtgacagaacacattctagatgaacagaaaaagaaaaagccaaacccaggaaaggacaagaggacttatgagcccagctctgccacccccgtgaccaggtcctcccagggctcaccctcggtggttgttgcaccatcacccaaaaccaaggggcagaaagcagaagatgtccctgtgaggattgcactgggtgcaagttcctgtgaaatatgccacgaggtgttcaaatcaaaaaacgtgcgtgtgctcaaatgtgggcacaagtatcacaaagggtgctttaagcagtggcttaaagggcagagcgcttgcccggcctgccagggtcgtgatctcctgacagaagagtcaccttctggaagaggctggcccagtcagaatcaggagctgccttcctgctcttctaggtagtcacacttcactaaagtgtcatccaccagtgtgttgaatccgaanaatgacaattttctaccactggtgtaaaaaacaaacattttgaagacccttgtgcattgtgtgtcacaaagctaaatacatggaaatcgttaaaatcgttgatattaagtaatttnccccactctgagtgaaatacttttgaatgattgccaaccagtggctaanaaaaatgnacggcntaccacacctccatggggttcncttggggctnccgcaagggctnttttgaaggtnggntggctttctttttggaaaanaactntnaaacgtnntccgaanccaantattnntnggganaanaatttnntaacannagccnaaccccccccccgtttggttcccccacnttttggtccccctttttccgntttgaaaaanccggttcntggnaacncccnaaaaanaaaagaaaanganntttttnanttttttttnaaaaaccngnnttnccggaaanccccaaattttnnccccaaaaattncgcnntttnaggntgggcanaaccaanncannttttnaaatattnaaantaanggtnaaaattngggnnatntaaaancanaaaaaacaaatccccnctttganaaccccccccccntttanattttttatttttncncccccctaaangatttaagggnncttnccctttaangggnnctn

SEQ ID NO: 63 - DNA, 1200 bp, Homo Sapiens
  misc_feature (1)..(2): n is a, c, g, or t
  misc_feature (901)..(901): n is a, c, g, or t
  misc_feature (927)..(927): n is a, c, g, or t
  misc_feature (929)..(929): n is a, c, g, or t
  misc_feature (950)..(950): n is a, c, g, or t
  misc_feature (959)..(959): n is a, c, g, or t
  misc_feature (961)..(961): n is a, c, g, or t
  misc_feature (985)..(985): n is a, c, g, or t
  misc_feature (1005)..(1005): n is a, c, g, or t
  misc_feature (1023)..(1023): n is a, c, g, or t
  misc_feature (1028)..(1028): n is a, c, g, or t
  misc_feature (1030)..(1030): n is a, c, g, or t
  misc_feature (1044)..(1044): n is a, c, g, or t
  misc_feature (1051)..(1051): n is a, c, g, or t
  misc_feature (1055)..(1055): n is a, c, g, or t
  misc_feature (1062)..(1062): n is a, c, g, or t
  misc_feature (1064)..(1064): n is a, c, g, or t
  misc_feature (1068)..(1069): n is a, c, g, or t
  misc_feature (1095)..(1095): n is a, c, g, or t
  misc_feature (1098)..(1098): n is a, c, g, or t
  misc_feature (1105)..(1105): n is a, c, g, or t
  misc_feature (1109)..(1109): n is a, c, g, or t
  misc_feature (1114)..(1114): n is a, c, g, or t
  misc_feature (1119)..(1119): n is a, c, g, or t
  misc_feature (1140)..(1140): n is a, c, g, or t
  misc_feature (1142)..(1142): n is a, c, g, or t
  misc_feature (1147)..(1147): n is a, c, g, or t
  misc_feature (1154)..(1154): n is a, c, g, or t
  misc_feature (1156)..(1156): n is a, c, g, or t
  misc_feature (1159)..(1159): n is a, c, g, or t
  misc_feature (1163)..(1164): n is a, c, g, or t
  misc_feature (1178)..(1178): n is a, c, g, or t
  misc_feature (1180)..(1180): n is a, c, g, or t
  misc_feature (1200)..(1200): n is a, c, g, or t
nnattagagagaattaactatggagaggatcgcatcaccatcaccatcacggatcctatttaggtgacactatagaatcgtcgacccacgcgtccgcaagaacggaatatcagccggaacagaagaacaaagggaagttccgggtgccgaaaatcgctgaatttacggtcaccatccttgtcagcctggccctagctttccttgcgtgcatcgtgttcctggtggtttacaaagccttcacctatgatcacagctgcccagagggattcgtctataagcacaaacgctgtatcccagcctccctggatgcttactactcctcccaggaccccaattccagaagccgcttctacacagtcatcagccactacagcgtggccaagcagagcactgcccgggccatcgggccgtggctgtcagcagccgctgtcatccatgagcccaagccgcccaagacccagggccactagaggcctgccccagccagaatggggggcggggtggagaggaggacccccattggctaagccaagctccagttacaagacaacactgtactcctgggatatgggggcgggggcggggcagggcagggtggggggaagaacgcaccaaaaacgtggtgtgtgctggagttgtctgaaccgatatttctttttgttccttggtattgttgattcgtcgccgagtcaggctcatgtacaaaggcatgtttcgtgttgattgttcccatgtaagatatttttaaagccactgcttattctttgttaggaaaatgtaacagcagaaaaggaaagaaacaaagaacatgaacaaaaagcattaaactggctccatcaaaagacgttgaagggcagtgaagagcacagactctgtgggcttcttaaataagaaaacgtancttcagtgggggctccagggttgcanantatgagtgacacaaacgggantattccatnancctggggtctgcagggtaggcccncaggaaatgaagaatggccnaactggaaaaaaaaactnatttngnattactaaccccanaacgcanttancccaaangnaatnngctggcctctggggattttgcaaaangancaaaaantttntgggnccccntcctaagaactgggcaaaccnantggcntgggctntnaangccnnccctggaagggggntntgctcaaaaaaccttgagan

SEQ ID NO: 64 - DNA, 1200 bp, Homo Sapiens
  misc_feature (711)..(711): n is a, c, g, or t
  misc_feature (854)..(854): n is a, c, g, or t
  misc_feature (867)..(867): n is a, c, g, or t
  misc_feature (871)..(871): n is a, c, g, or t
  misc_feature (879)..(881): n is a, c, g, or t
  misc_feature (883)..(885): n is a, c, g, or t
  misc_feature (888)..(890): n is a, c, g, or t
  misc_feature (892)..(895): n is a, c, g, or t
  misc_feature (898)..(903): n is a, c, g, or t
  misc_feature (905)..(909): n is a, c, g, or t
  misc_feature (914)..(915): n is a, c, g, or t
  misc_feature (919)..(919): n is a, c, g, or t
  misc_feature (925)..(925): n is a, c, g, or t
  misc_feature (928)..(928): n is a, c, g, or t
  misc_feature (949)..(949): n is a, c, g, or t
  misc_feature (951)..(951): n is a, c, g, or t
  misc_feature (955)..(955): n is a, c, g, or t
  misc_feature (960)..(960): n is a, c, g, or t
  misc_feature (966)..(966): n is a, c, g, or t
  misc_feature (968)..(968): n is a, c, g, or t
  misc_feature (970)..(970): n is a, c, g, or t
  misc_feature (975)..(975): n is a, c, g, or t
  misc_feature (982)..(982): n is a, c, g, or t
  misc_feature (999)..(999): n is a, c, g, or t
  misc_feature (1006)..(1006): n is a, c, g, or t
  misc_feature (1016)..(1016): n is a, c, g, or t
  misc_feature (1033)..(1033): n is a, c, g, or t
  misc_feature (1063)..(1064): n is a, c, g, or t
  misc_feature (1075)..(1075): n is a, c, g, or t
  misc_feature (1078)..(1078): n is a, c, g, or t
  misc_feature (1081)..(1081): n is a, c, g, or t
  misc_feature (1085)..(1085): n is a, c, g, or t
  misc_feature (1116)..(1116): n is a, c, g, or t
  misc_feature (1123)..(1123): n is a, c, g, or t
  misc_feature (1125)..(1125): n is a, c, g, or t
  misc_feature (1148)..(1148): n is a, c, g, or t
  misc_feature (1161)..(1161): n is a, c, g, or t
  misc_feature (1178)..(1178): n is a, c, g, or t
  misc_feature (1181)..(1183): n is a, c, g, or t
  misc_feature (1190)..(1190): n is a, c, g, or t
  misc_feature (1197)..(1197): n is a, c, g, or t
atagagaaattactatgagaggatcgcatcaccatcaccatcacgggatcctatttaggtgacactatagaatcgtcgacccacgcgtccgcccacgcgtccgcccacgcgtccgcccacgcgtccggcaaaaaagagcccttgatcatttcagaagaggatgtacgggagaacgtggtcacctatgatgatgaaggaggcggagaggaagacacagaggcctttgacatcacagccttgaggaatccttctgctgctgaggagctcaagtaccggagggatatcagacctgaagtgaagctcactcccagacaccagacatcatccaccctggaaagcatagatgttcaggaatttattaagcaaagactggcagaagcagacctagaccctagcgttcccccttatgactctcttcagacttatgcctatgagggtcagagatcagaagctgggtctatcagctcgctggattcagcaacgacacaatcagaccaggattatcactaccttggagactggggacccgagtttaaaaagttagctgaactctatggagaaatagaatctgaaagaacaacttagggggtcagttcttgcaaccttgtggaatttgcttcctgagtaagtggatatacaacctcagcaatgacaaggaagaagtgtggaaacagtacttggaactgaggaagctggacacagctcctgtanaaacaagtgcccttttcatgatcgaaaactgggttatttaattggaagaaagtaaaaaaaaaaaaaaaaagacaatacaaagaaaaaagttattgttccttgtgtatattttcaattgctcaataaaagtctgtggtaactgntttattaggaaanaaanaaaaaaannnannntannnannnnttnnnnnnannnnnggggnngccncctccntanagggagtccgaattaaacctnanttanctganctttgnancncccgnttgaaanaatccaaaaaatgaccntcaaaantccttctggnatttgttccaaaacccncgggttgccccccgggggttttttttttgnnggaaaaatccnaanctnaatnttggggaaaatttttcgggaacttaaggaancttaaantnggaaaaaaaaaatccccgggaanaaccccccctttnaatattcccccagggcntcnnnaaaaaanatttttnggg

SEQ ID NO: 65 - DNA, 1422 bp, Homo Sapiens
  misc_feature (936)..(936): n is a, c, g, or t
  misc_feature (938)..(938): n is a, c, g, or t
  misc_feature (952)..(952): n is a, c, g, or t
  misc_feature (989)..(989): n is a, c, g, or t
  misc_feature (1005)..(1005): n is a, c, g, or t
  misc_feature (1030)..(1030): n is a, c, g, or t
  misc_feature (1046)..(1046): n is a, c, g, or t
  misc_feature (1048)..(1048): n is a, c, g, or t
  misc_feature (1053)..(1053): n is a, c, g, or t
  misc_feature (1055)..(1055): n is a, c, g, or t
  misc_feature (1070)..(1070): n is a, c, g, or t
  misc_feature (1083)..(1083): n is a, c, g, or t
  misc_feature (1091)..(1091): n is a, c, g, or t
  misc_feature (1128)..(1129): n is a, c, g, or t
  misc_feature (1151)..(1151): n is a, c, g, or t
  misc_feature (1157)..(1159): n is a, c, g, or t
  misc_feature (1165)..(1165): n is a, c, g, or t
  misc_feature (1169)..(1170): n is a, c, g, or t
  misc_feature (1172)..(1172): n is a, c, g, or t
  misc_feature (1180)..(1181): n is a, c, g, or t
  misc_feature (1200)..(1200): n is a, c, g, or t
  misc_feature (1211)..(1212): n is a, c, g, or t
  misc_feature (1217)..(1217): n is a, c, g, or t
  misc_feature (1225)..(1225): n is a, c, g, or t
  misc_feature (1227)..(1227): n is a, c, g, or t
  misc_feature (1241)..(1241): n is a, c, g, or t
  misc_feature (1257)..(1257): n is a, c, g, or t
  misc_feature (1269)..(1269): n is a, c, g, or t
  misc_feature (1279)..(1280): n is a, c, g, or t
  misc_feature (1287)..(1288): n is a, c, g, or t
  misc_feature (1291)..(1291): n is a, c, g, or t
  misc_feature (1300)..(1302): n is a, c, g, or t
  misc_feature (1314)..(1314): n is a, c, g, or t
  misc_feature (1316)..(1320): n is a, c, g, or t
  misc_feature (1327)..(1327): n is a, c, g, or t
  misc_feature (1339)..(1339): n is a, c, g, or t
  misc_feature (1344)..(1344): n is a, c, g, or t
  misc_feature (1346)..(1346): n is a, c, g, or t
  misc_feature (1350)..(1350): n is a, c, g, or t
  misc_feature (1352)..(1353): n is a, c, g, or t
  misc_feature (1355)..(1357): n is a, c, g, or t
  misc_feature (1360)..(1361): n is a, c, g, or t
  misc_feature (1367)..(1368): n is a, c, g, or t
  misc_feature (1376)..(1376): n is a, c, g, or t
  misc_feature (1382)..(1382): n is a, c, g, or t
  misc_feature (1386)..(1386): n is a, c, g, or t
  misc_feature (1391)..(1391): n is a, c, g, or t
  misc_feature (1393)..(1393): n is a, c, g, or t
  misc_feature (1414)..(1414): n is a, c, g, or t
  misc_feature (1418)..(1419): n is a, c, g, or t
  misc_feature (1422)..(1422): n is a, c, g, or t
tagagaaattactatgagaggatcgcatcaccatcaccatcacggatcctatttaggtgacactatagaatcgtcgacccacgcgtccggcagcatggcggcgggggcggctgaggcagctgtagcggccgtggaggaggtcggctcagccgggcagtttgaggagctgctgcgcctcaaagccaagtccctccttgtggtccatttctgggcaccatgggctccacagtgtgcacagatgaacgaagttatggcagagttagctaaagaactccctcaagtttcatttgtgaagttggaagctgaaggtgttcctgaagtatctgaaaaatatgaaattagctctgttcccacttttctgtttttcaagaattctcagaaaatcgaccgattagatggtgcacatgccccagagttgaccaaaaaagttcagcgacatgcatctagtggctccttcctacccagcgctaatgaacatcttaaagaagatctcaaccttcgcttgaagaaattgactcatgctgccccctgcatgctgtttatgaaaggaactcctcaagaaccacgctgtggtttcagcaagcagatggtggaaattcttcacaaacataatattcagtttagcagttttgatatcttctcagatgaagaggttcgacagggactcaaagcctattccagttggcctacctatcctcagctctatgtttctggagagctcataggaggacttgatataattaaggagctagaagcatctgaagaactagatacaatttgtcccaaagctcccaaattagaggaaaggctcaaagtgctgacaaataaaagcttctgtgatgctctttatgaaaggaaacaaacaggaagcaaaatgtggattcagcaaacaaattctggaaatactaatagtactggggttgaatatgaaacatncnatatattggaggangaaaaaattcggcaaggattaaagcttactcaaaatnggccaacatacccccnacctgtatgtgaaaggggaactggnggaggattggaaattngngaagnanctgaaaaaaaatggngaattgctgcctntactgganagaaaaaaataaaaaatcttaaacttggggcccactnntggaaaaaaattttattacttngggacnnnttctgnattnntnccccaaannggactaagaaaaaaaaatncccgccttccnnaaaangtttgggnanttccaaggccggcnaaaaaaaggaggtaanttttttcccccnaaaaaaaggnnaaaactnntcnttttttccnnnaaaaaaaaaaanannnnnaaaaaanggggcccccccnagggncnaaancnnannnaanngcccgnnaaacaaancccaancccnttttnancccggcccggtttttgaaaancaannaan

SEQ ID NO: 66 - DNA, 1392 bp, Homo Sapiens
  misc_feature (1)..(1): n is a, c, g, or t
  misc_feature (859)..(859): n is a, c, g, or t
  misc_feature (868)..(868): n is a, c, g, or t
  misc_feature (875)..(875): n is a, c, g, or t
  misc_feature (886)..(886): n is a, c, g, or t
  misc_feature (908)..(908): n is a, c, g, or t
  misc_feature (937)..(937): n is a, c, g, or t
  misc_feature (946)..(946): n is a, c, g, or t
  misc_feature (950)..(950): n is a, c, g, or t
  misc_feature (964)..(965): n is a, c, g, or t
  misc_feature (988)..(988): n is a, c, g, or t
  misc_feature (991)..(991): n is a, c, g, or t
  misc_feature (1009)..(1009): n is a, c, g, or t
  misc_feature (1022)..(1022): n is a, c, g, or t
  misc_feature (1033)..(1033): n is a, c, g, or t
  misc_feature (1040)..(1040): n is a, c, g, or t
  misc_feature (1044)..(1044): n is a, c, g, or t
  misc_feature (1046)..(1046): n is a, c, g, or t
  misc_feature (1061)..(1061): n is a, c, g, or t
  misc_feature (1067)..(1067): n is a, c, g, or t
  misc_feature (1081)..(1082): n is a, c, g, or t
  misc_feature (1087)..(1088): n is a, c, g, or t
  misc_feature (1093)..(1093): n is a, c, g, or t
  misc_feature (1095)..(1095): n is a, c, g, or t
  misc_feature (1097)..(1097): n is a, c, g, or t
  misc_feature (1100)..(1100): n is a, c, g, or t
  misc_feature (1105)..(1105): n is a, c, g, or t
  misc_feature (1111)..(1111): n is a, c, g, or t
  misc_feature (1114)..(1114): n is a, c, g, or t
  misc_feature (1120)..(1120): n is a, c, g, or t
  misc_feature (1124)..(1124): n is a, c, g, or t
  misc_feature (1128)..(1128): n is a, c, g, or t
  misc_feature (1132)..(1132): n is a, c, g, or t
  misc_feature (1136)..(1136): n is a, c, g, or t
  misc_feature (1142)..(1143): n is a, c, g, or t
  misc_feature (1148)..(1148): n is a, c, g, or t
  misc_feature (1157)..(1157): n is a, c, g, or t
  misc_feature (1162)..(1162): n is a, c, g, or t
  misc_feature (1168)..(1168): n is a, c, g, or t
  misc_feature (1171)..(1171): n is a, c, g, or t
  misc_feature (1188)..(1188): n is a, c, g, or t
  misc_feature (1192)..(1192): n is a, c, g, or t
  misc_feature (1196)..(1196): n is a, c, g, or t
  misc_feature (1210)..(1210): n is a, c, g, or t
  misc_feature (1219)..(1221): n is a, c, g, or t
  misc_feature (1225)..(1225): n is a, c, g, or t
  misc_feature (1247)..(1247): n is a, c, g, or t
  misc_feature (1253)..(1254): n is a, c, g, or t
  misc_feature (1260)..(1262): n is a, c, g, or t
  misc_feature (1264)..(1265): n is a, c, g, or t
  misc_feature (1273)..(1273): n is a, c, g, or t
  misc_feature (1278)..(1278): n is a, c, g, or t
  misc_feature (1285)..(1289): n is a, c, g, or t
  misc_feature (1295)..(1295): n is a, c, g, or t
  misc_feature (1299)..(1299): n is a, c, g, or t
  misc_feature (1304)..(1304): n is a, c, g, or t
  misc_feature (1307)..(1307): n is a, c, g, or t
  misc_feature (1311)..(1311): n is a, c, g, or t
  misc_feature (1315)..(1317): n is a, c, g, or t
  misc_feature (1319)..(1319): n is a, c, g, or t
  misc_feature (1321)..(1322): n is a, c, g, or t
  misc_feature (1332)..(1334): n is a, c, g, or t
  misc_feature (1336)..(1341): n is a, c, g, or t
  misc_feature (1346)..(1346): n is a, c, g, or t
  misc_feature (1348)..(1348): n is a, c, g, or t
  misc_feature (1351)..(1351): n is a, c, g, or t
  misc_feature (1353)..(1353): n is a, c, g, or t
  misc_feature (1358)..(1359): n is a, c, g, or t
  misc_feature (1365)..(1367): n is a, c, g, or t
  misc_feature (1370)..(1376): n is a, c, g, or t
  misc_feature (1378)..(1378): n is a, c, g, or t
  misc_feature (1380)..(1382): n is a, c, g, or t
  misc_feature (1384)..(1384): n is a, c, g, or t
  misc_feature (1386)..(1387): n is a, c, g, or t
  misc_feature (1391)..(1392): n is a, c, g, or t
nttagagaaaattactatgagaggatcgcatcaccatcaccatcacggatcctatttaggtgacactatagaatcgtcgacccacgcgtccgcccacgcgtccgcagagcatcatcagcaccgtgggccaagctttcgagctgcgcttcaagcagtacctgcacagcccgcccaaggtggcgctgcccccagaaaggctggcagggccggaggagtcggcctggggggacgaggaggactctttggagcacaattactacaacagcatcccggggaaggagccgccgctgggcgggctagtggactccaggctggccctgacacagccctgcgccctcacggccctcgaccagggcccatctccttctctaagagatgcctgcagcctgccatgggacgtggggtccaccggtacaggaccagtggcccagcccccctacccgccgggcccctgtggcccccacggaggaacagctgcgtcaggagccctggtaccacggccggatgagccgccgggcggcagagaggatgcttcgagctgacggggacttccttgtgcgagacagcgtcaccaaccccgggcagtatgtcctcaccggcatgcacgccgggcagcccaagcacctgctgctcgtggaccccgagggcgtggtacggacgaaggacgtgctgtttgagagcatcagccacctgatcgaccaccacctgcagaacgggcagcccatcgtggccgccgagagtgagctgcacctgcgtggcgtggtctcacgggagccctgagccaggtgaccgttctcagccctggctcctgcctgttctcagccccagctcctgcctgtcatggccttggggctctcanccctcctcntggatcntggtcaggccnaaacaccgctgcctctcctttnttcgcatgaacctctggcatggtctttcntcaactggncccngggctgggcaaaannttcttcttgccggggccccttgnccnaccccctcttttgcctgnagtgagggtgttnatacaaaaaanggaaacntttncnccttttaaaaaaaanaattcnaaaaacaacccctnncttcnnaaccntngnccnggggntccccntcncccctnggtnggtncggncaancccccnnaaaantaaaattcnaaaanctgggnaanaaagggaattccgggcngggngggnttttttttcccctnaaaaagggnnncaantttttttaaggggaaccttaangttttnnggtttnnngnnaaaaaatnttggntaaaatnnnnnctttantccntgaanttngggnaacnnntntnnaaaaggaatnnnannnnnngcccntntcntnaaaannaaaaannnttnnnnnnntncnnnantnncccnn

SEQ ID NO: 67 - DNA, 1404 bp, Homo Sapiens
  misc_feature (2)..(3): n is a, c, g, or t
  misc_feature (691)..(691): n is a, c, g, or t
  misc_feature (754)..(754): n is a, c, g, or t
  misc_feature (762)..(762): n is a, c, g, or t
  misc_feature (772)..(772): n is a, c, g, or t
  misc_feature (792)..(792): n is a, c, g, or t
  misc_feature (797)..(797): n is a, c, g, or t
  misc_feature (799)..(799): n is a, c, g, or t
  misc_feature (803)..(803): n is a, c, g, or t
  misc_feature (810)..(810): n is a, c, g, or t
  misc_feature (814)..(814): n is a, c, g, or t
  misc_feature (837)..(837): n is a, c, g, or t
  misc_feature (846)..(847): n is a, c, g, or t
  misc_feature (898)..(898): n is a, c, g, or t
  misc_feature (910)..(910): n is a, c, g, or t
  misc_feature (927)..(928): n is a, c, g, or t
  misc_feature (944)..(944): n is a, c, g, or t
  misc_feature (951)..(951): n is a, c, g, or t
  misc_feature (955)..(955): n is a, c, g, or t
  misc_feature (966)..(966): n is a, c, g, or t
  misc_feature (968)..(969): n is a, c, g, or t
  misc_feature (984)..(985): n is a, c, g, or t
  misc_feature (987)..(987): n is a, c, g, or t
  misc_feature (993)..(993): n is a, c, g, or t
  misc_feature (1003)..(1003): n is a, c, g, or t
  misc_feature (1010)..(1010): n is a, c, g, or t
  misc_feature (1013)..(1013): n is a, c, g, or t
  misc_feature (1023)..(1023): n is a, c, g, or t
  misc_feature (1033)..(1033): n is a, c, g, or t
  misc_feature (1035)..(1035): n is a, c, g, or t
  misc_feature (1040)..(1040): n is a, c, g, or t
  misc_feature (1043)..(1043): n is a, c, g, or t
  misc_feature (1064)..(1065): n is a, c, g, or t
  misc_feature (1118)..(1118): n is a, c, g, or t
  misc_feature (1123)..(1123): n is a, c, g, or t
  misc_feature (1135)..(1135): n is a, c, g, or t
  misc_feature (1147)..(1147): n is a, c, g, or t
  misc_feature (1152)..(1153): n is a, c, g, or t
  misc_feature (1155)..(1156): n is a, c, g, or t
  misc_feature (1159)..(1159): n is a, c, g, or t
  misc_feature (1174)..(1174): n is a, c, g, or t
  misc_feature (1179)..(1181): n is a, c, g, or t
  misc_feature (1184)..(1184): n is a, c, g, or t
  misc_feature (1187)..(1187): n is a, c, g, or t
  misc_feature (1189)..(1189): n is a, c, g, or t
  misc_feature (1193)..(1193): n is a, c, g, or t
  misc_feature (1200)..(1200): n is a, c, g, or t
  misc_feature (1205)..(1205): n is a, c, g, or t
  misc_feature (1209)..(1209): n is a, c, g, or t
  misc_feature (1229)..(1230): n is a, c, g, or t
  misc_feature (1237)..(1237): n is a, c, g, or t
  misc_feature (1242)..(1242): n is a, c, g, or t
  misc_feature (1270)..(1270): n is a, c, g, or t
  misc_feature (1291)..(1291): n is a, c, g, or t
  misc_feature (1294)..(1294): n is a, c, g, or t
  misc_feature (1298)..(1298): n is a, c, g, or t
  misc_feature (1303)..(1303): n is a, c, g, or t
  misc_feature (1307)..(1307): n is a, c, g, or t
  misc_feature (1315)..(1315): n is a, c, g, or t
  misc_feature (1319)..(1319): n is a, c, g, or t
  misc_feature (1330)..(1330): n is a, c, g, or t
  misc_feature (1332)..(1332): n is a, c, g, or t
  misc_feature (1347)..(1347): n is a, c, g, or t
  misc_feature (1361)..(1362): n is a, c, g, or t
  misc_feature (1365)..(1365): n is a, c, g, or t
  misc_feature (1379)..(1379): n is a, c, g, or t
  misc_feature (1391)..(1391): n is a, c, g, or t
  misc_feature (1394)..(1396): n is a, c, g, or t
  misc_feature (1401)..(1401): n is a, c, g, or t
  misc_feature (1403)..(1404): n is a, c, g, or t
annaatagagagaattactatgagaggatcgcatcaccatcaccatcacggatcctatttaggtgacactatagaatcgtcgacccacgcgtccgcccacgcgtccggtgaagggtctatgaccaaagaagaatttgccaagatgaaacaagaactggaagctgagtatctcgctgtgtttaagaagactgtgtcctcccatgaagtctttcttcagcggctttcttctcaccctgttctcagtaaagatcgcaactttcatgttttcctggaatatgatcaggatctaagtgttaggcggaaaaatactaaagagatgtttggtggcttcttcaaaagtgtggtgaaaagtgctgatgaagtcctttttactggagttaaggaggtagatgacttctttgagcaagagaagaacttccttattaactattacaataggatcaaagattcttgtgtgaaagctgacaaaatgaccagatctcataaaaatgttgccgatgactatatccacaccgcagcctgcttacatagcctggctttagaagagcccacagtcatcaaaaagtacctattgaaggttgctgagctatttgaaaaactaaggaaagtagagggtcgagtttcatcagatgaagatttgaagctaacagagctcctccgatactacatgctcaacattgaagctgctaangatctcttatacagacgcaccaaagccctcattgactatgagaactcaaacaaagctctgganaagggccnggttaaaganccaaagacgtccaagttggnctgangncacnccagcangagngctgccagaaaatttgaacaacnttccgaatnnggcaaaagaaagaactgaaaaaattttcaaacgggaagaaaaggggcagcnattttaaaaaanaatccaaatttgaaaanncctgaaactgggaaanaaaaaanatgncccgggaaaanannggcccccccttttgnnanaaactnttattggacntgtttcnaanaaaaaaaccngaaaaggccncnccccnccnaaaaaaaaaaaaaaatggaannggaaaaaaaagccccagcccccccttggccctttaaatcctttccccccgganaaaanaattaccctccnccttttagtttnaaaanntnnggnaaaaaaaattttttnttttnnnccnaancntttnaaatttnaaccncggngggggttaaaaaaaaataannggggggnccctngggacaaaaaaaatttttccctgggggnttttaaaaacccccggggggnaancccnaaaangggntccccccnaaanccccctttttntnataaaaggggggggnaaaaattatccccnnggnaaaaaaaaaaacancccggggccggnccnnnaaaanann

SEQ ID NO: 68 - DNA, 1205 bp, Homo Sapiens
  misc_feature (815)..(815): n is a, c, g, or t
  misc_feature (858)..(858): n is a, c, g, or t
  misc_feature (871)..(871): n is a, c, g, or t
  misc_feature (903)..(903): n is a, c, g, or t
  misc_feature (921)..(921): n is a, c, g, or t
  misc_feature (924)..(924): n is a, c, g, or t
  misc_feature (933)..(933): n is a, c, g, or t
  misc_feature (951)..(951): n is a, c, g, or t
  misc_feature (954)..(954): n is a, c, g, or t
  misc_feature (968)..(968): n is a, c, g, or t
  misc_feature (971)..(971): n is a, c, g, or t
  misc_feature (976)..(976): n is a, c, g, or t
  misc_feature (978)..(978): n is a, c, g, or t
  misc_feature (998)..(998): n is a, c, g, or t
  misc_feature (1004)..(1004): n is a, c, g, or t
  misc_feature (1010)..(1010): n is a, c, g, or t
  misc_feature (1013)..(1013): n is a, c, g, or t
  misc_feature (1026)..(1026): n is a, c, g, or t
  misc_feature (1032)..(1032): n is a, c, g, or t
  misc_feature (1040)..(1040): n is a, c, g, or t
  misc_feature (1043)..(1043): n is a, c, g, or t
  misc_feature (1051)..(1051): n is a, c, g, or t
  misc_feature (1058)..(1058): n is a, c, g, or t
  misc_feature (1061)..(1061): n is a, c, g, or t
  misc_feature (1064)..(1064): n is a, c, g, or t
  misc_feature (1077)..(1077): n is a, c, g, or t
  misc_feature (1092)..(1092): n is a, c, g, or t
  misc_feature (1097)..(1099): n is a, c, g, or t
  misc_feature (1104)..(1104): n is a, c, g, or t
  misc_feature (1110)..(1110): n is a, c, g, or t
  misc_feature (1115)..(1115): n is a, c, g, or t
  misc_feature (1122)..(1123): n is a, c, g, or t
  misc_feature (1134)..(1134): n is a, c, g, or t
  misc_feature (1136)..(1136): n is a, c, g, or t
  misc_feature (1143)..(1143): n is a, c, g, or t
  misc_feature (1151)..(1152): n is a, c, g, or t
  misc_feature (1155)..(1157): n is a, c, g, or t
  misc_feature (1161)..(1161): n is a, c, g, or t
  misc_feature (1167)..(1167): n is a, c, g, or t
  misc_feature (1169)..(1169): n is a, c, g, or t
  misc_feature (1172)..(1172): n is a, c, g, or t
  misc_feature (1174)..(1174): n is a, c, g, or t
  misc_feature (1177)..(1178): n is a, c, g, or t
  misc_feature (1181)..(1183): n is a, c, g, or t
  misc_feature (1192)..(1192): n is a, c, g, or t
  misc_feature (1196)..(1197): n is a, c, g, or t
  misc_feature (1202)..(1202): n is a, c, g, or t
gagaaattactatgagaggatcgcatcaccatcaccatcacggatcctatttaggtgacactatagaatcgtcgacccacgcgtccgcggacgcgtgggtgccagtgggcacgcaggccaccatgaagggcatcacgaccgaacagctggacgctctgggttgccgcatctgcctgggcaatacctaccatctgggtctaaggccggtgggtgggctctgcccgcgcggggaggcggcgaggcggcgaggcgtggggagccatggagcgtcctccaggcccggacactcctcccaaagtcaatcgaccagctgtattgagcgcccccaatgaccaggccttgtactgggcgtgaaagagcagcagggactaaagctggccagatctgtctcccaagaagggcccccagggacgcggtcacccctaacctgacactttcttccatcaacccagggacccgagctgatccagaaagccaacggtctccacggcttcatgaattggcctcataatctgctaacggacagcggcggtttccagatggtgtcgctggtgtctctgtccgaggtgacggaggagggcgtccgcttccgctccccctacgacggcaatgagaccctgctgagcccggagaaatccgtgcagatccagaatgcgctgggctcggacatcatcatgcagctggacgacgtggttagcagtactgtgactgggccacgtgtggaggaggccatgtacaggtcaatccgctggctggaccggtgcattgcagcccatcagcggccggacaagcaaaacctcttcgccattatccanggtgggctggacgcaaatctccgggccacctgccttgaaaaanatgaccaagcganacgtgcctggcttccccatcgggggcctgacnggggtgaaaaacaagtcncanttctggcgnatggtggcgctgaacacntcncggctgccaagaanaanccccnanatctgatggggttgggtatnttttgnaaaagnaancaaaaaccctacntgtggnaaatgganttntgggggancccctanccntgnttggggaggtggnttttgggggaaaaangaaannnggttnttaatntgaanaaaaaannaaaaaatgggntntcccttngggggccnnttnnnaggnaaaatngnccnanttnnggnnnattttaaantttnnaaagnccc

SEQ ID NO: 69 - DNA, 1327 bp, Homo Sapiens
  misc_feature (746)..(746): n is a, c, g, or t
  misc_feature (847)..(847): n is a, c, g, or t
  misc_feature (864)..(864): n is a, c, g, or t
  misc_feature (884)..(884): n is a, c, g, or t
  misc_feature (894)..(894): n is a, c, g, or t
  misc_feature (913)..(913): n is a, c, g, or t
  misc_feature (930)..(930): n is a, c, g, or t
  misc_feature (946)..(946): n is a, c, g, or t
  misc_feature (948)..(948): n is a, c, g, or t
  misc_feature (969)..(969): n is a, c, g, or t
  misc_feature (983)..(983): n is a, c, g, or t
  misc_feature (997)..(997): n is a, c, g, or t
  misc_feature (1000)..(1000): n is a, c, g, or t
  misc_feature (1014)..(1014): n is a, c, g, or t
  misc_feature (1019)..(1019): n is a, c, g, or t
  misc_feature (1028)..(1028): n is a, c, g, or t
  misc_feature (1030)..(1030): n is a, c, g, or t
  misc_feature (1034)..(1034): n is a, c, g, or t
  misc_feature (1037)..(1037): n is a, c, g, or t
  misc_feature (1045)..(1045): n is a, c, g, or t
  misc_feature (1047)..(1047): n is a, c, g, or t
  misc_feature (1050)..(1050): n is a, c, g, or t
  misc_feature (1061)..(1061): n is a, c, g, or t
  misc_feature (1075)..(1075): n is a, c, g, or t
  misc_feature (1080)..(1080): n is a, c, g, or t
  misc_feature (1091)..(1091): n is a, c, g, or t
  misc_feature (1107)..(1107): n is a, c, g, or t
  misc_feature (1109)..(1109): n is a, c, g, or t
  misc_feature (1123)..(1123): n is a, c, g, or t
  misc_feature (1141)..(1141): n is a, c, g, or t
  misc_feature (1144)..(1144): n is a, c, g, or t
  misc_feature (1149)..(1149): n is a, c, g, or t
  misc_feature (1159)..(1160): n is a, c, g, or t
  misc_feature (1162)..(1162): n is a, c, g, or t
  misc_feature (1178)..(1178): n is a, c, g, or t
  misc_feature (1189)..(1189): n is a, c, g, or t
  misc_feature (1195)..(1195): n is a, c, g, or t
  misc_feature (1205)..(1205): n is a, c, g, or t
  misc_feature (1209)..(1209): n is a, c, g, or t
  misc_feature (1214)..(1214): n is a, c, g, or t
  misc_feature (1219)..(1219): n is a, c, g, or t
  misc_feature (1223)..(1223): n is a, c, g, or t
  misc_feature (1233)..(1233): n is a, c, g, or t
  misc_feature (1235)..(1235): n is a, c, g, or t
  misc_feature (1237)..(1237): n is a, c, g, or t
  misc_feature (1240)..(1240): n is a, c, g, or t
  misc_feature (1246)..(1248): n is a, c, g, or t
  misc_feature (1250)..(1250): n is a, c, g, or t
  misc_feature (1253)..(1254): n is a, c, g, or t
  misc_feature (1258)..(1259): n is a, c, g, or t
  misc_feature (1263)..(1266): n is a, c, g, or t
  misc_feature (1269)..(1270): n is a, c, g, or t
  misc_feature (1273)..(1275): n is a, c, g, or t
  misc_feature (1277)..(1277): n is a, c, g, or t
  misc_feature (1282)..(1286): n is a, c, g, or t
  misc_feature (1293)..(1293): n is a, c, g, or t
  misc_feature (1298)..(1300): n is a, c, g, or t
  misc_feature (1304)..(1304): n is a, c, g, or t
  misc_feature (1310)..(1311): n is a, c, g, or t
  misc_feature (1318)..(1318): n is a, c, g, or t
  misc_feature (1322)..(1323): n is a, c, g, or t
agaaattactatgagaggatcgcatcaccatcaccatcacggatcctatttaggtgacactatagaatcgtcgacccacgcgtccgttcctgcctctgccagaacggagggacctgtgaccctgtctcaggccactgtgcgtgcccagagggctgggccggcctggcctgtgagaaggagtgcctcccccgggacgtcagagctggctgccggcacagcggcggttgcctcaacgggggcctgtgtgacccgcacacgggccgctgcctctgcccagccggctggactggggacaagtgtcagagcccctgcctgcggggctggtttggagaggcctgtgcccagcgctgcagctgcccgcctggcgctgcctgccaccacgtcactggggcctgccgctgtccccctggcttcactggctccggctgcgagcagggatgtccgcccgggcggtatgggccaggctgtgaacagctgtgtgggtgtctcaacgggggctcctgtgatgcggccacgggggcctgccgctgccccactgggttcctcgggacggactgcaacctcacctgtccgcagggccgcttcggccccaactgcacccacgtgtgtgggtgtgggcagggggcggcctgcgaccctgtgaccggcacctgcctctgccccccggggagagccggcgtccgctgtgagcgaggctgcccccagaaccggtttggcgtgggctgcgagcacacctgctcctgcanaaatgggggcctgtgccacgccagcaacggcagctgctcctgtggcctgggctggacggggcggcactgcgagctggcctgtccccctgggcgctacgganccgcctgcaatctggantgctcctgccacaacaacancacgtgtgancctgcaacgggcacctgcngctgcggccccggcttntatggcaaggcctgcnancaccctgtcccctggcttcanggggctgctgccanggttttgctgttgnaanatgaaccccctgcnacccnataatggcnangctntgncctgcggntncanggcaatttggnaaaagggttgaacnagttnatttgaaaagnttccccaaccctttantntaaaggggggcacntggaacctttaacggttnttnctttnccccaagggnntnaaaaaccttttaactntaattaaaaanggccantttggccccnttcnccccnatttnaatncggggggggntnanatnaacctnnntnggnnattnntttnnnnaannaannngnccccnnnnnaaaaggnccctnnncccnaaaaanntttttangggnngggg

SEQ ID NO: 70 - DNA, 1413 bp, Homo Sapiens
  misc_feature (756)..(756): n is a, c, g, or t
  misc_feature (790)..(790): n is a, c, g, or t
  misc_feature (839)..(839): n is a, c, g, or t
  misc_feature (867)..(867): n is a, c, g, or t
  misc_feature (927)..(927): n is a, c, g, or t
  misc_feature (933)..(933): n is a, c, g, or t
  misc_feature (939)..(939): n is a, c, g, or t
  misc_feature (964)..(964): n is a, c, g, or t
  misc_feature (966)..(966): n is a, c, g, or t
  misc_feature (969)..(969): n is a, c, g, or t
  misc_feature (974)..(974): n is a, c, g, or t
  misc_feature (977)..(977): n is a, c, g, or t
  misc_feature (999)..(999): n is a, c, g, or t
  misc_feature (1002)..(1002): n is a, c, g, or t
  misc_feature (1004)..(1004): n is a, c, g, or t
  misc_feature (1006)..(1006): n is a, c, g, or t
  misc_feature (1010)..(1010): n is a, c, g, or t
  misc_feature (1014)..(1014): n is a, c, g, or t
  misc_feature (1019)..(1019): n is a, c, g, or t
  misc_feature (1031)..(1031): n is a, c, g, or t
  misc_feature (1039)..(1039): n is a, c, g, or t
  misc_feature (1045)..(1045): n is a, c, g, or t
  misc_feature (1051)..(1051): n is a, c, g, or t
  misc_feature (1054)..(1054): n is a, c, g, or t
  misc_feature (1056)..(1056): n is a, c, g, or t
  misc_feature (1058)..(1058): n is a, c, g, or t
  misc_feature (1060)..(1060): n is a, c, g, or t
  misc_feature (1062)..(1062): n is a, c, g, or t
  misc_feature (1081)..(1081): n is a, c, g, or t
  misc_feature (1084)..(1084): n is a, c, g, or t
  misc_feature (1086)..(1086): n is a, c, g, or t
  misc_feature (1088)..(1088): n is a, c, g, or t
  misc_feature (1090)..(1090): n is a, c, g, or t
  misc_feature (1114)..(1114): n is a, c, g, or t
  misc_feature (1120)..(1121): n is a, c, g, or t
  misc_feature (1124)..(1124): n is a, c, g, or t
  misc_feature (1126)..(1126): n is a, c, g, or t
  misc_feature (1133)..(1133): n is a, c, g, or t
  misc_feature (1135)..(1135): n is a, c, g, or t
  misc_feature (1148)..(1148): n is a, c, g, or t
  misc_feature (1161)..(1161): n is a, c, g, or t
  misc_feature (1166)..(1166): n is a, c, g, or t
  misc_feature (1170)..(1170): n is a, c, g, or t
  misc_feature (1173)..(1173): n is a, c, g, or t
  misc_feature (1180)..(1180): n is a, c, g, or t
  misc_feature (1184)..(1184): n is a, c, g, or t
  misc_feature (1190)..(1190): n is a, c, g, or t
  misc_feature (1195)..(1195): n is a, c, g, or t
  misc_feature (1200)..(1200): n is a, c, g, or t
  misc_feature (1203)..(1204): n is a, c, g, or t
  misc_feature (1210)..(1211): n is a, c, g, or t
  misc_feature (1228)..(1229): n is a, c, g, or t
  misc_feature (1234)..(1234): n is a, c, g, or t
  misc_feature (1243)..(1243): n is a, c, g, or t
  misc_feature (1247)..(1248): n is a, c, g, or t
  misc_feature (1255)..(1255): n is a, c, g, or t
  misc_feature (1260)..(1260): n is a, c, g, or t
  misc_feature (1267)..(1267): n is a, c, g, or t
  misc_feature (1270)..(1270): n is a, c, g, or t
  misc_feature (1274)..(1275): n is a, c, g, or t
  misc_feature (1279)..(1279): n is a, c, g, or t
  misc_feature (1289)..(1289): n is a, c, g, or t
  misc_feature (1291)..(1292): n is a, c, g, or t
  misc_feature (1294)..(1294): n is a, c, g, or t
  misc_feature (1301)..(1301): n is a, c, g, or t
  misc_feature (1303)..(1303): n is a, c, g, or t
  misc_feature (1307)..(1307): n is a, c, g, or t
  misc_feature (1313)..(1313): n is a, c, g, or t
  misc_feature (1320)..(1320): n is a, c, g, or t
  misc_feature (1323)..(1323): n is a, c, g, or t
  misc_feature (1325)..(1325): n is a, c, g, or t
  misc_feature (1333)..(1333): n is a, c, g, or t
  misc_feature (1339)..(1339): n is a, c, g, or t
  misc_feature (1345)..(1345): n is a, c, g, or t
  misc_feature (1351)..(1351): n is a, c, g, or t
  misc_feature (1353)..(1353): n is a, c, g, or t
  misc_feature (1362)..(1362): n is a, c, g, or t
  misc_feature (1364)..(1364): n is a, c, g, or t
  misc_feature (1366)..(1367): n is a, c, g, or t
  misc_feature (1374)..(1374): n is a, c, g, or t
  misc_feature (1378)..(1378): n is a, c, g, or t
  misc_feature (1384)..(1384): n is a, c, g, or t
  misc_feature (1386)..(1386): n is a, c, g, or t
  misc_feature (1396)..(1396): n is a, c, g, or t
  misc_feature (1399)..(1399): n is a, c, g, or t
  misc_feature (1405)..(1405): n is a, c, g, or t
ggaatagagagaattactatgagaggatcgcatcaccatcaccatcacggatcctatttaggtgacactatagaatcgtcgacccacgcgtccgctgggactctgggagcagcagtgaagtcttcagatactgccctacctccacctccagtgcctcccaaatctgaagccgtcagagaagaatgccggctcctgaacgccccacctgttccaccccgaagcgcaaagcctttgtccaccagtccctccatccctcctcgcacagtcaagccagcgcggcaacagactcgctctcccagccccaccttgtcctactattcttcagggctacacaacatcgtcactaaaactgacacaaatccttctgaaagcactcctgtttcctgctatccatgtaaccgagtgaaaactgattctgtggacctgaaatccccgtttggaagtccttctgctgaagctgtgtcctctcggctctcatggcctaaccattattcaggagcatcagaaagccagaccaggagtgacttcctgctggatccaagcaggagttatagttaccctagacaaaagacgccaggcacaccaaagagaaactgcccagcaccttttgattttgatggctgtgagctcctggccagccccactagcccagtcactgcagaattcagtagcagcgtctctggttgtcccaagtcagccagctactctctggagagcacagatgtgaaatctcttgcagctggtgtgacaaagcanagtacgtcatgccctgccttaccccccagggctnccaaaactagtggaagagaaggtcgcctccgaaacatctcctttgcctntgaaaattgatggtgctgaaggaaagancccaagtctggggtcaccaaaatctctcggagggaccagtatttttggttaaaaaggggnatggcnggaaantcttctctggcctcctaaccttttntnatntccgnctncaatctccaagtgggccccaanatncntntggngaanggttnccccatggaagnccacctgntgaacntaatcnggnantntntnaggagggaaagggtccaantcntnangnttcattggttttggtccaaaaaantcaaannccntntttggtnangaaaaaaaatgangggaacctttttntttcnctanagnaaaaaancttnttcaanaattncaaantannaaattnnagggaaaaaaaaaaagnnatttnttttagggngggnnccaaaantaacnaaaaacnccngcannaagngaaaaaaatntnnanggggggntnaaangggggnggggaanaantntttttttnaaaaanctttcntgaaangnaaaaaaacntntnntcaattntttnggggananctttttcttnaantttttnaaaaaaaa

SEQ ID NO: 71 - DNA, 1312 bp, Homo Sapiens
  misc_feature (837)..(837): n is a, c, g, or t
  misc_feature (849)..(849): n is a, c, g, or t
  misc_feature (854)..(854): n is a, c, g, or t
  misc_feature (887)..(892): n is a, c, g, or t
  misc_feature (894)..(905): n is a, c, g, or t
  misc_feature (909)..(909): n is a, c, g, or t
  misc_feature (912)..(912): n is a, c, g, or t
  misc_feature (929)..(929): n is a, c, g, or t
  misc_feature (936)..(936): n is a, c, g, or t
  misc_feature (944)..(944): n is a, c, g, or t
  misc_feature (956)..(957): n is a, c, g, or t
  misc_feature (960)..(960): n is a, c, g, or t
  misc_feature (966)..(966): n is a, c, g, or t
  misc_feature (970)..(970): n is a, c, g, or t
  misc_feature (981)..(981): n is a, c, g, or t
  misc_feature (990)..(991): n is a, c, g, or t
  misc_feature (993)..(993): n is a, c, g, or t
  misc_feature (996)..(996): n is a, c, g, or t
  misc_feature (999)..(999): n is a, c, g, or t
  misc_feature (1003)..(1004): n is a, c, g, or t
  misc_feature (1012)..(1012): n is a, c, g, or t
  misc_feature (1017)..(1017): n is a, c, g, or t
  misc_feature (1037)..(1037): n is a, c, g, or t
  misc_feature (1047)..(1048): n is a, c, g, or t
  misc_feature (1087)..(1087): n is a, c, g, or t
  misc_feature (1094)..(1095): n is a, c, g, or t
  misc_feature (1102)..(1102): n is a, c, g, or t
  misc_feature (1114)..(1114): n is a, c, g, or t
  misc_feature (1118)..(1120): n is a, c, g, or t
  misc_feature (1125)..(1125): n is a, c, g, or t
  misc_feature (1130)..(1131): n is a, c, g, or t
  misc_feature (1142)..(1142): n is a, c, g, or t
  misc_feature (1160)..(1160): n is a, c, g, or t
  misc_feature (1164)..(1164): n is a, c, g, or t
  misc_feature (1167)..(1167): n is a, c, g, or t
  misc_feature (1176)..(1177): n is a, c, g, or t
  misc_feature (1189)..(1189): n is a, c, g, or t
  misc_feature (1193)..(1194): n is a, c, g, or t
  misc_feature (1197)..(1197): n is a, c, g, or t
  misc_feature (1199)..(1199): n is a, c, g, or t
  misc_feature (1215)..(1215): n is a, c, g, or t
  misc_feature (1225)..(1228): n is a, c, g, or t
  misc_feature (1230)..(1231): n is a, c, g, or t
  misc_feature (1237)..(1238): n is a, c, g, or t
  misc_feature (1242)..(1242): n is a, c, g, or t
  misc_feature (1244)..(1246): n is a, c, g, or t
  misc_feature (1253)..(1254): n is a, c, g, or t
  misc_feature (1256)..(1256): n is a, c, g, or t
  misc_feature (1259)..(1261): n is a, c, g, or t
  misc_feature (1267)..(1269): n is a, c, g, or t
  misc_feature (1273)..(1273): n is a, c, g, or t
  misc_feature (1281)..(1282): n is a, c, g, or t
  misc_feature (1284)..(1284): n is a, c, g, or t
  misc_feature (1295)..(1295): n is a, c, g, or t
  misc_feature (1297)..(1298): n is a, c, g, or t
  misc_feature (1300)..(1300): n is a, c, g, or t
  misc_feature (1307)..(1307): n is a, c, g, or t
  misc_feature (1309)..(1311): n is a, c, g, or t
aatagagaaattactatgagaggatcgcatcaccatcaccatcacggatcctatttaggtgacactatagaatcgtcgacccacgcgtccgcccacgcgtccgcgagagcccatcggagaccccaggcccccgcccagcaggacctgcaggggacgagccagccgagagcccatcggagaccccaggcccccgcccggcaggacctgcaggggacgagccagccgagagcccatcggagaccccaggccccagcccggcaggacctacaagggatgagccagccgagagcccatcggagaccccaggcccccgcccggcaggacctgcaggggacgagccagccgagagcccatcggagaccccaggcccccgcccggcaggacctgcaggggacgagccagccgagagcccatcggagaccccaggccccagcccggcaggacctacaagggatgagccagccaaggcgggggaggcagcagagttgcaggacgcagaggtggagtcttctgccaagtctgggaagccttaaggaaaggagtgcccgtcggcgtcttggtcctcctgtccctgctgcaggggctggggcctccggagctgctgcgggctcccctcaggctctgcttcgtgacccgtgacccatgacccacagtgctggcctcctgtggggccactatagcagccaccagaagccgcgaggccctcagggaagcccaaggcctgcagaagcctcctggcctggctgtgtcttccccacccagctctcccctgcgccccctgtctttgtaattgacccttctggagtgggggggcggcgggcaggctgcttttcttantctgataccaancaggnccttttctgataaattcttttactttgaaaaannnnnntnnnnnnnnnnnnaaanggngggccgctcccttttantgagtcntatttaancctttattttannttnaacttnggantccttgtttantaaattccnntnatngancctnnaaaaattnccttnttggattttttttcaaaaanccttcggttnncccccccgggggtttttttttttttgttgaaaaaatccnaaacttnnttttggnaaaatttttttngggnnnttaanggaanntttaaaatggnaaaaaaaaaatttccttngatnttnccccctttnnatttttcccaantggnnttntnaaaaaaaattttttgngggatttttnnnnanntttttnnaatntnnncttttanncnaannntttttnnntggntttttagnncntttttttaaancnntnaaaaaantnnnc

SEQ ID NO: 72 - DNA, 1200 bp, Homo Sapiens
  misc_feature (710)..(710): n is a, c, g, or t
  misc_feature (767)..(767): n is a, c, g, or t
  misc_feature (929)..(929): n is a, c, g, or t
  misc_feature (978)..(979): n is a, c, g, or t
  misc_feature (1000)..(1000): n is a, c, g, or t
  misc_feature (1027)..(1028): n is a, c, g, or t
  misc_feature (1034)..(1034): n is a, c, g, or t
  misc_feature (1041)..(1041): n is a, c, g, or t
  misc_feature (1044)..(1044): n is a, c, g, or t
  misc_feature (1065)..(1067): n is a, c, g, or t
  misc_feature (1091)..(1091): n is a, c, g, or t
  misc_feature (1110)..(1110): n is a, c, g, or t
  misc_feature (1115)..(1115): n is a, c, g, or t
  misc_feature (1122)..(1122): n is a, c, g, or t
  misc_feature (1124)..(1124): n is a, c, g, or t
  misc_feature (1129)..(1129): n is a, c, g, or t
  misc_feature (1134)..(1134): n is a, c, g, or t
  misc_feature (1147)..(1147): n is a, c, g, or t
  misc_feature (1152)..(1152): n is a, c, g, or t
  misc_feature (1163)..(1163): n is a, c, g, or t
  misc_feature (1174)..(1174): n is a, c, g, or t
  misc_feature (1186)..(1186): n is a, c, g, or t
  misc_feature (1193)..(1193): n is a, c, g, or t
  misc_feature (1199)..(1199): n is a, c, g, or t
tagagagaattactatgagaggatcgcatcaccatcaccatcacggatcctatttaggtgacactatagaatcgtcgacccacgcgtccgccctgtcctccagtggtgaaagctgggagactctgccggggaaagaagagcgggaacctccacaggctaaggtgagtgccagcactggcaccagccctggccccggtgctagtgccagtgccggggctggcgccggggccagtgctggcagcaatggcagcaattaccttgaagaagttcgagaaccatctcttcaggaagagcaggcatccctggaagaaggagaaattccttggctccagtaccatgagaatgacagtagcagtgagggggataatgattctggtcacgagttgatgcaacctggggtattcatgctggatggaaacaacaaccttgaagatgactccagtgtgagcgaagacctagaagtggattggagcctctttgatggatttgcagatgggttaggagtggctgaagccatttcctatgtggaccctcagttcctcacctacatggcacttgaagaacgcctggcccaggcaatggaaactgcccttgcgcacttggagtctctcgcagtggatgtagaggtggccaatccaccagcaagcaaggagagcattgacgctcttcccgagatcctggtcactgaagatcatggcgcagttggtcangagatgtgctgccccatctgctgtagcgaatatgtgaagggggaggtggcaactganctgccgtgccaccactatttccacaagcccgtgtgtgtccatctggcttcaaaagtcaggcacctgccccgtgtgccgctgcatgttccctccccccactctaaaaaaccaaggccgtttactcctggtctgaattattttccccatctgaaatcccccaanactgcaaggagccctctttgaaattaacaatgggaaataaaaccaatcnntccatttaaccctaaacctantgattcccccgggaatattttccaatnngaaaanagttgtngtntgaattgccttaaaaatccannnccctctttttaaggttaaaaaaanggaaaactaaacctttctnaatgncaacttngnaaatngcaanaaaaaaaaaaccnttttncaaccggaaanttaaatcccantttttttcctcnaaaaaanggaaang

SEQ ID NO: 73 - DNA, 1289 bp, Homo Sapiens
  misc_feature (2)..(2): n is a, c, g, or t
  misc_feature (801)..(801): n is a, c, g, or t
  misc_feature (809)..(809): n is a, c, g, or t
  misc_feature (819)..(819): n is a, c, g, or t
  misc_feature (858)..(858): n is a, c, g, or t
  misc_feature (866)..(866): n is a, c, g, or t
  misc_feature (899)..(899): n is a, c, g, or t
  misc_feature (901)..(901): n is a, c, g, or t
  misc_feature (911)..(911): n is a, c, g, or t
  misc_feature (915)..(915): n is a, c, g, or t
  misc_feature (923)..(923): n is a, c, g, or t
  misc_feature (925)..(925): n is a, c, g, or t
  misc_feature (929)..(929): n is a, c, g, or t
  misc_feature (934)..(934): n is a, c, g, or t
  misc_feature (941)..(941): n is a, c, g, or t
  misc_feature (943)..(943): n is a, c, g, or t
  misc_feature (968)..(968): n is a, c, g, or t
  misc_feature (978)..(978): n is a, c, g, or t
  misc_feature (984)..(984): n is a, c, g, or t
  misc_feature (986)..(986): n is a, c, g, or t
  misc_feature (999)..(999): n is a, c, g, or t
  misc_feature (1002)..(1002): n is a, c, g, or t
  misc_feature (1006)..(1006): n is a, c, g, or t
  misc_feature (1011)..(1011): n is a, c, g, or t
  misc_feature (1014)..(1016): n is a, c, g, or t
  misc_feature (1018)..(1019): n is a, c, g, or t
  misc_feature (1022)..(1022): n is a, c, g, or t
  misc_feature (1032)..(1033): n is a, c, g, or t
  misc_feature (1035)..(1035): n is a, c, g, or t
  misc_feature (1042)..(1042): n is a, c, g, or t
  misc_feature (1072)..(1072): n is a, c, g, or t
  misc_feature (1082)..(1082): n is a, c, g, or t
  misc_feature (1091)..(1091): n is a, c, g, or t
  misc_feature (1100)..(1100): n is a, c, g, or t
  misc_feature (1103)..(1103): n is a, c, g, or t
  misc_feature (1126)..(1126): n is a, c, g, or t
  misc_feature (1142)..(1142): n is a, c, g, or t
  misc_feature (1146)..(1146): n is a, c, g, or t
  misc_feature (1148)..(1148): n is a, c, g, or t
  misc_feature (1150)..(1150): n is a, c, g, or t
  misc_feature (1152)..(1152): n is a, c, g, or t
  misc_feature (1159)..(1159): n is a, c, g, or t
  misc_feature (1162)..(1162): n is a, c, g, or t
  misc_feature (1165)..(1165): n is a, c, g, or t
  misc_feature (1176)..(1177): n is a, c, g, or t
  misc_feature (1180)..(1180): n is a, c, g, or t
  misc_feature (1192)..(1192): n is a, c, g, or t
  misc_feature (1196)..(1196): n is a, c, g, or t
  misc_feature (1206)..(1207): n is a, c, g, or t
  misc_feature (1209)..(1209): n is a, c, g, or t
  misc_feature (1213)..(1213): n is a, c, g, or t
  misc_feature (1217)..(1220): n is a, c, g, or t
  misc_feature (1225)..(1226): n is a, c, g, or t
  misc_feature (1232)..(1233): n is a, c, g, or t
  misc_feature (1237)..(1238): n is a, c, g, or t
  misc_feature (1241)..(1241): n is a, c, g, or t
  misc_feature (1246)..(1246): n is a, c, g, or t
  misc_feature (1250)..(1250): n is a, c, g, or t
  misc_feature (1255)..(1255): n is a, c, g, or t
  misc_feature (1261)..(1261): n is a, c, g, or t
  misc_feature (1267)..(1268): n is a, c, g, or t
  misc_feature (1271)..(1271): n is a, c, g, or t
  misc_feature (1273)..(1274): n is a, c, g, or t
  misc_feature (1280)..(1281): n is a, c, g, or t
  misc_feature (1283)..(1284): n is a, c, g, or t
  misc_feature (1286)..(1286): n is a, c, g, or t
tnctatgagaggatcgcatcaccatcaccatcacgggatcctatttaggtgacactatagaatcgtcgacccacgcgtccgagacacttccggttgcgacggaggtaggcttacgaggcctgtgtcgggtagaaagggtccttcctggaccgggaccctctgccacgaccatggaccgtaggaaaaagcctttggacgtcacggcctcctcgttggtagatcttaaggctgaactcttccgaaagcaagaagaattcaaacaagaaaaacttctaaaagattctggagtttttggaaaaccaaaaacaactaacaagaaaccaagtatctggagcaaacagaatgtaggcgtttcaaatcgagctgagaaggatgctgaacagaagattgaagaacagaagactttagacaaagcaagggaaaaattggaagaaaaagccaaattatatgaaaaaatgactaaaggagactttatagatgaagaagtagaggatatgtaccttgtggatttcacacagaagatcatagacaagcgcaaagaaatggaggcatctggtgcccatagagattctcaaaaggcaggagaaagggacgacgatgaggaaaaccttcctgagggagagatccctcctccccaagaccccagtgaagaatgggtggattacgtggactctttggggcgttcccggcgctgtatgagaaaggatttgccagatctgctggagatggataaaaatcttcaggggagactgtaagtgtgtgtggtatacagagctctgccaaggtctgaaaatgcagccncagggatngttttgtganggggaggctgttttataattaatgatctctgttgctccngtaagganatattgattgattgattgattgatggattggancnctttttaagnggtnagcatgcncntccnccccntaatccncncttggggaacaaccctgactggggnatgaataaanctgtcncntttttacttgganggntgtnggccnccnnntnnccnaataaccccnncngaacccnccaaccccggcttttggggaaaacaagggntttgaaaaanacccttgantttcccccnaanagggggcccccgggaaaaaactnaccccctttttctttnggancntngnctttttnaanaanggcccttaaannaanttttccccgggncctnaacctaaaanntncttnaaannnnaaccnnaaaaanncccnnaanccccngggnaaaantccccnttcccnnagnanntttttnngnnanggg

SEQ ID NO: 74 - DNA, 1373 bp, Homo Sapiens
  misc_feature (1)..(1): n is a, c, g, or t
  misc_feature (3)..(3): n is a, c, g, or t
  misc_feature (873)..(873): n is a, c, g, or t
  misc_feature (960)..(960): n is a, c, g, or t
  misc_feature (975)..(975): n is a, c, g, or t
  misc_feature (986)..(986): n is a, c, g, or t
  misc_feature (997)..(997): n is a, c, g, or t
  misc_feature (1017)..(1017): n is a, c, g, or t
  misc_feature (1019)..(1019): n is a, c, g, or t
  misc_feature (1022)..(1022): n is a, c, g, or t
  misc_feature (1030)..(1030): n is a, c, g, or t
  misc_feature (1042)..(1042): n is a, c, g, or t
  misc_feature (1047)..(1047): n is a, c, g, or t
  misc_feature (1054)..(1054): n is a, c, g, or t
  misc_feature (1057)..(1057): n is a, c, g, or t
  misc_feature (1074)..(1075): n is a, c, g, or t
  misc_feature (1082)..(1082): n is a, c, g, or t
  misc_feature (1084)..(1084): n is a, c, g, or t
  misc_feature (1086)..(1086): n is a, c, g, or t
  misc_feature (1089)..(1089): n is a, c, g, or t
  misc_feature (1097)..(1098): n is a, c, g, or t
  misc_feature (1106)..(1106): n is a, c, g, or t
  misc_feature (1113)..(1114): n is a, c, g, or t
  misc_feature (1133)..(1133): n is a, c, g, or t
  misc_feature (1136)..(1137): n is a, c, g, or t
  misc_feature (1139)..(1139): n is a, c, g, or t
  misc_feature (1144)..(1144): n is a, c, g, or t
  misc_feature (1150)..(1151): n is a, c, g, or t
  misc_feature (1154)..(1154): n is a, c, g, or t
  misc_feature (1158)..(1158): n is a, c, g, or t
  misc_feature (1161)..(1161): n is a, c, g, or t
  misc_feature (1167)..(1167): n is a, c, g, or t
  misc_feature (1175)..(1175): n is a, c, g, or t
  misc_feature (1183)..(1183): n is a, c, g, or t
  misc_feature (1195)..(1195): n is a, c, g, or t
  misc_feature (1197)..(1197): n is a, c, g, or t
  misc_feature (1199)..(1199): n is a, c, g, or t
  misc_feature (1206)..(1206): n is a, c, g, or t
  misc_feature (1217)..(1217): n is a, c, g, or t
  misc_feature (1236)..(1236): n is a, c, g, or t
  misc_feature (1239)..(1239): n is a, c, g, or t
  misc_feature (1242)..(1242): n is a, c, g, or t
  misc_feature (1245)..(1245): n is a, c, g, or t
  misc_feature (1259)..(1260): n is a, c, g, or t
  misc_feature (1263)..(1263): n is a, c, g, or t
  misc_feature (1267)..(1267): n is a, c, g, or t
  misc_feature (1270)..(1270): n is a, c, g, or t
  misc_feature (1273)..(1274): n is a, c, g, or t
  misc_feature (1277)..(1277): n is a, c, g, or t
  misc_feature (1297)..(1298): n is a, c, g, or t
  misc_feature (1307)..(1307): n is a, c, g, or t
  misc_feature (1312)..(1312): n is a, c, g, or t
  misc_feature (1317)..(1317): n is a, c, g, or t
  misc_feature (1320)..(1321): n is a, c, g, or t
  misc_feature (1327)..(1327): n is a, c, g, or t
  misc_feature (1332)..(1332): n is a, c, g, or t
  misc_feature (1342)..(1342): n is a, c, g, or t
  misc_feature (1344)..(1344): n is a, c, g, or t
  misc_feature (1348)..(1348): n is a, c, g, or t
  misc_feature (1373)..(1373): n is a, c, g, or t
nantagagaaattactatgagaggatcgcatcaccatcaccatcacggatcctatttaggtgacactatagaatcgtcgacccacgcgtccgccttgcacctgctgaagtgcagctttgacgtggtcaagcgctgggtgaatgaggctcaggaggcagcatccagtgataacatcatggtccagtaccacgcactagggctcctgtaccatgtgcgtaagaatgaccgcctagccgtcaataagatgatcagcaaggtcacacggcacggccttaagtctccctttgcctactgcatgatgatccgggtggccagcaagcaggtggaagaggaggatggcagccgtgacagcccactgtttgacttcatcgagagctgcttgcgcaacaagcacgagatggtggtgtatgaagccgcctcggccatcgtcaatctgccaggctgcagtgccaaagagctggccccggctgtgtcaggtcactgggcattccttcacccagcgtcacatgtttatgcttgctgggaactaggcctgggttcccgggctaggagaaagaaagaaaatgctcttaacaagtgttaaggagtctgtacctaggaagcacctgccccagacactatgctgagtccccacttgtatcacgttttggtggtgggctgctgttagttccatctgactgctgaagaggctgagtgctccagcttttctgcagctcacccaaggctgctctccgctatgctgctgttcgtaccctcaataaggttgccatgaagcatccgtcagctgtgacagcttgtaatctggatctggagaacctggtcacagattcaaaccgcagcattgccacgctggccatcaccaccctccttaanacgggcagcgagaagcagcatcgaccgcctcatgaagcaaatctcctccttcatgtcaaaaatctcggatgaattcaaggtggtggntgtccagcccatcantgccctgtgtnaaaaatatccncccaaacccccgtccttatnanttncctgttcnccatgctgcggnaaaanggtggcnttnaataaaaccccctatcnnggaacgncncntcnccttcttnnaaaaaacnccaaaannaagaaacagggttttcccnctnncnaattncccaannatncaanttnccgggntgcccccntattctantccctggccagnangnccaaaancccaaaccccnaaaaaaccctttcctaaancanggnttnaaaaaaaaaaccgnnagncctnatntcnnccnattttgacccaaaaaaaatnnccccatttnttttnaaaanaanntccccnccaangaaaatcctnancaanttttttttttttttaaaaaaaaaan

SEQ ID NO: 75 - DNA, 1344 bp, Homo Sapiens
  misc_feature (3)..(3): n is a, c, g, or t
  misc_feature (881)..(881): n is a, c, g, or t
  misc_feature (970)..(970): n is a, c, g, or t
  misc_feature (987)..(987): n is a, c, g, or t
  misc_feature (1001)..(1001): n is a, c, g, or t
  misc_feature (1003)..(1003): n is a, c, g, or t
  misc_feature (1008)..(1008): n is a, c, g, or t
  misc_feature (1012)..(1012): n is a, c, g, or t
  misc_feature (1020)..(1020): n is a, c, g, or t
  misc_feature (1031)..(1031): n is a, c, g, or t
  misc_feature (1037)..(1037): n is a, c, g, or t
  misc_feature (1056)..(1056): n is a, c, g, or t
  misc_feature (1062)..(1062): n is a, c, g, or t
  misc_feature (1065)..(1065): n is a, c, g, or t
  misc_feature (1090)..(1090): n is a, c, g, or t
  misc_feature (1094)..(1094): n is a, c, g, or t
  misc_feature (1110)..(1110): n is a, c, g, or t
  misc_feature (1133)..(1133): n is a, c, g, or t
  misc_feature (1143)..(1143): n is a, c, g, or t
  misc_feature (1151)..(1151): n is a, c, g, or t
  misc_feature (1162)..(1162): n is a, c, g, or t
  misc_feature (1181)..(1181): n is a, c, g, or t
  misc_feature (1186)..(1186): n is a, c, g, or t
  misc_feature (1190)..(1190): n is a, c, g, or t
  misc_feature (1193)..(1193): n is a, c, g, or t
  misc_feature (1198)..(1198): n is a, c, g, or t
  misc_feature (1201)..(1201): n is a, c, g, or t
  misc_feature (1207)..(1207): n is a, c, g, or t
  misc_feature (1212)..(1213): n is a, c, g, or t
  misc_feature (1218)..(1218): n is a, c, g, or t
  misc_feature (1221)..(1221): n is a, c, g, or t
  misc_feature (1224)..(1224): n is a, c, g, or t
  misc_feature (1229)..(1229): n is a, c, g, or t
  misc_feature (1232)..(1232): n is a, c, g, or t
  misc_feature (1252)..(1252): n is a, c, g, or t
  misc_feature (1262)..(1262): n is a, c, g, or t
  misc_feature (1266)..(1266): n is a, c, g, or t
  misc_feature (1269)..(1269): n is a, c, g, or t
  misc_feature (1281)..(1281): n is a, c, g, or t
  misc_feature (1284)..(1284): n is a, c, g, or t
  misc_feature (1299)..(1299): n is a, c, g, or t
  misc_feature (1306)..(1306): n is a, c, g, or t
  misc_feature (1308)..(1309): n is a, c, g, or t
  misc_feature (1313)..(1313): n is a, c, g, or t
  misc_feature (1316)..(1317): n is a, c, g, or t
  misc_feature (1326)..(1326): n is a, c, g, or t
  misc_feature (1337)..(1340): n is a, c, g, or t
  misc_feature (1343)..(1343): n is a, c, g, or t
atngagaaattactatgagaggatcgcatcaccatcaccatcacggatcctatttaggtgacactatagaatcgtcgacccacgcgtccggcggggagctggagccagagcggctaccccgaaagctgcgggccgagcttgaggccgcgctggggaagaagcacaagggcggtgatagctccagtggcccccaacgcttggtttctttccgtctcatccgggatctgcaccagcatctgagagaaagggattccaaactatacctccatgagctcctagaaggcagtgaaatctatctcccagaggttgtgaagcctccacggaacccagaactagttgcccggctggagaagattaagatacagctggccaatgaggaatataaacggatcacccgcaacgtcacttgtcaggatacaagacatggtgggactctcagcgacctgggaaagcaagtgagatcattgaaggctctggtcatcaccatcttcaatttcattgtcacggtggttgctgccttcgtctgcacttaccttggaagccaatatatcttcacagaaatggcctcgcgggtgctagctgcattaatcgtcgcctctgtggtgggtctggccgagctgtatgtcatggtgcgggcaatggaaggcgagctgggagaactgtaactggtgcttcatcatcaagtctagagaagactttgggggcttcaggctccaattggcagtcaccgactcagtcaacccatcagactttttgtattcagctccagttagtcagaagaccagcccaggccagctgctgtttctgtggggagccctaatcttctgtgaatttccaaagggagcattggaggagattgagataacacatctttaaaacanaaagaactggtcttggtctatcagtacctcttcctgaatctggtacccatctgccttctccagttcattctaaacactgctgggactanggtttttccatcaggancaatggaatccagncnttccnaaantaaaccanactgccttganttgtcntatgtacaactgatcccanctttcncanaatttttatgcaaactggaattganttcnaaacctccaaaaaaanaaaaggatcccctttcccatttnggctggaaangactgatnaaaacttcaanaaaaaaaatggtttctaangatgnaaantgnaacangcncctccnttttnnaaaanaanggnttagnccntttccaaaaaaaaaaacccnaaaataaggncccnggncctttttttaangancaaaacccatttttnaaatttnannttanttnnaaaataaangggggaaaaannnnaanc

SEQ ID NO: 76 - DNA, 1200 bp, Homo Sapiens
  misc_feature (3)..(3): n is a, c, g, or t
  misc_feature (25)..(25): n is a, c, g, or t
  misc_feature (908)..(908): n is a, c, g, or t
  misc_feature (914)..(914): n is a, c, g, or t
  misc_feature (920)..(920): n is a, c, g, or t
  misc_feature (941)..(941): n is a, c, g, or t
  misc_feature (956)..(957): n is a, c, g, or t
  misc_feature (962)..(962): n is a, c, g, or t
  misc_feature (967)..(967): n is a, c, g, or t
  misc_feature (986)..(986): n is a, c, g, or t
  misc_feature (994)..(995): n is a, c, g, or t
  misc_feature (1019)..(1020): n is a, c, g, or t
  misc_feature (1027)..(1027): n is a, c, g, or t
  misc_feature (1036)..(1036): n is a, c, g, or t
  misc_feature (1045)..(1045): n is a, c, g, or t
  misc_feature (1049)..(1050): n is a, c, g, or t
  misc_feature (1052)..(1052): n is a, c, g, or t
  misc_feature (1054)..(1054): n is a, c, g, or t
  misc_feature (1064)..(1064): n is a, c, g, or t
  misc_feature (1079)..(1079): n is a, c, g, or t
  misc_feature (1081)..(1081): n is a, c, g, or t
  misc_feature (1083)..(1083): n is a, c, g, or t
  misc_feature (1086)..(1086): n is a, c, g, or t
  misc_feature (1090)..(1090): n is a, c, g, or t
  misc_feature (1095)..(1096): n is a, c, g, or t
  misc_feature (1101)..(1101): n is a, c, g, or t
  misc_feature (1106)..(1107): n is a, c, g, or t
  misc_feature (1117)..(1117): n is a, c, g, or t
  misc_feature (1120)..(1120): n is a, c, g, or t
  misc_feature (1122)..(1122): n is a, c, g, or t
  misc_feature (1137)..(1141): n is a, c, g, or t
  misc_feature (1151)..(1151): n is a, c, g, or t
  misc_feature (1154)..(1155): n is a, c, g, or t
  misc_feature (1159)..(1159): n is a, c, g, or t
  misc_feature (1173)..(1173): n is a, c, g, or t
  misc_feature (1175)..(1175): n is a, c, g, or t
  misc_feature (1181)..(1181): n is a, c, g, or t
  misc_feature (1187)..(1188): n is a, c, g, or t
  misc_feature (1195)..(1196): n is a, c, g, or t
  misc_feature (1199)..(1199): n is a, c, g, or t
atngagaaattactatgagaggatngcatcaccatcaccatcacggatcctatttaggtgacactatagaatcgtcgacccacgcgtccggcaggagctgtcgggaagatcagaagccagtcatggatgaccagcgcgaccttatctccaacaatgagcaactgcccatgctgggccggcgccctggggccccggagagcaagtgcagccgcggagccctgtacacaggcttttccatcctggtgactctgctcctcgctggccaggccaccaccgcctacttcctgtaccagcagcagggccggctggacaaactgacagtcacctcccagaacctgcagctggagaacctgcgcatgaagcttcccaagcctcccaagcctgtgagcaagatgcgcatggccaccccgctgctgatgcaggcgctgcccatgggagccctgccccaggggcccatgcagaatgccaccaagtatggcaacatgacagaggaccatgtgatgcacctgctccagaatgctgaccccctgaaggtgtacccgccactgaaggggagcttcccggagaacctgagacaccttaagaacaccatggagaccatagactggaaggtctttgagagctggatgcaccattggctcctgtttgaaatgagcaggcactccttggagcaaaagcccactgacgctccaccgaaagagtcactggaactggaggacccgtcttctgggctgggtgtgaccaagcaggatctgggcccagtccccatgtgagagcagcagaggcggtcttcaacatcctgccagccccacacagctacagctttcttgctcccttcagcccccagcccctcccccatctcccaccctgtgcctcatcccatgaaaccctggtgcctggctctttcntcaccnttgganaaaaaaaccaagtcggaacancaaataacaatgcannaaggncctgntgcccaatctccatttgtnaaaggggnntgaggtcccagaagtggccaaaanntaaaaanatcccgttncttaaaatnaaannancntccaaaaaanggttccaaaaactangntnttngaanaaaannggaangccannggaaaaaggnatnancttaacccaaacccnnnnnggaatggtgnatnncccncccctccacctttngnctttgntttttnncaattannggng

SEQ ID NO: 77 - DNA, 1200 bp, Homo Sapiens
  misc_feature (2)..(2): n is a, c, g, or t
  misc_feature (4)..(4): n is a, c, g, or t
  misc_feature (29)..(29): n is a, c, g, or t
  misc_feature (35)..(35): n is a, c, g, or t
  misc_feature (63)..(63): n is a, c, g, or t
  misc_feature (68)..(68): n is a, c, g, or t
  misc_feature (76)..(76): n is a, c, g, or t
  misc_feature (297)..(297): n is a, c, g, or t
  misc_feature (570)..(570): n is a, c, g, or t
  misc_feature (662)..(662): n is a, c, g, or t
  misc_feature (665)..(665): n is a, c, g, or t
  misc_feature (683)..(683): n is a, c, g, or t
  misc_feature (702)..(702): n is a, c, g, or t
  misc_feature (705)..(705): n is a, c, g, or t
  misc_feature (711)..(711): n is a, c, g, or t
  misc_feature (723)..(723): n is a, c, g, or t
  misc_feature (758)..(758): n is a, c, g, or t
  misc_feature (777)..(777): n is a, c, g, or t
  misc_feature (798)..(798): n is a, c, g, or t
  misc_feature (812)..(812): n is a, c, g, or t
  misc_feature (816)..(816): n is a, c, g, or t
  misc_feature (834)..(834): n is a, c, g, or t
  misc_feature (843)..(843): n is a, c, g, or t
  misc_feature (846)..(846): n is a, c, g, or t
  misc_feature (856)..(856): n is a, c, g, or t
  misc_feature (859)..(859): n is a, c, g, or t
  misc_feature (861)..(861): n is a, c, g, or t
  misc_feature (863)..(863): n is a, c, g, or t
  misc_feature (866)..(867): n is a, c, g, or t
  misc_feature (874)..(874): n is a, c, g, or t
  misc_feature (879)..(879): n is a, c, g, or t
  misc_feature (884)..(884): n is a, c, g, or t
  misc_feature (897)..(897): n is a, c, g, or t
  misc_feature (900)..(900): n is a, c, g, or t
  misc_feature (906)..(906): n is a, c, g, or t
  misc_feature (911)..(911): n is a, c, g, or t
  misc_feature (918)..(918): n is a, c, g, or t
  misc_feature (932)..(933): n is a, c, g, or t
  misc_feature (938)..(939): n is a, c, g, or t
  misc_feature (942)..(942): n is a, c, g, or t
  misc_feature (949)..(949): n is a, c, g, or t
  misc_feature (955)..(955): n is a, c, g, or t
  misc_feature (959)..(959): n is a, c, g, or t
  misc_feature (964)..(964): n is a, c, g, or t
  misc_feature (966)..(966): n is a, c, g, or t
  misc_feature (969)..(969): n is a, c, g, or t
  misc_feature (973)..(973): n is a, c, g, or t
  misc_feature (980)..(981): n is a, c, g, or t
  misc_feature (984)..(984): n is a, c, g, or t
  misc_feature (987)..(987): n is a, c, g, or t
  misc_feature (992)..(992): n is a, c, g, or t
  misc_feature (994)..(998): n is a, c, g, or t
  misc_feature (1001)..(1001): n is a, c, g, or t
  misc_feature (1003)..(1003): n is a, c, g, or t
  misc_feature (1009)..(1009): n is a, c, g, or t
  misc_feature (1016)..(1016): n is a, c, g, or t
  misc_feature (1018)..(1019): n is a, c, g, or t
  misc_feature (1023)..(1023): n is a, c, g, or t
  misc_feature (1025)..(1025): n is a, c, g, or t
  misc_feature (1027)..(1029): n is a, c, g, or t
  misc_feature (1035)..(1035): n is a, c, g, or t
  misc_feature (1037)..(1037): n is a, c, g, or t
  misc_feature (1044)..(1044): n is a, c, g, or t
  misc_feature (1061)..(1061): n is a, c, g, or t
  misc_feature (1063)..(1063): n is a, c, g, or t
  misc_feature (1073)..(1073): n is a, c, g, or t
  misc_feature (1075)..(1076): n is a, c, g, or t
  misc_feature (1080)..(1080): n is a, c, g, or t
  misc_feature (1082)..(1082): n is a, c, g, or t
  misc_feature (1085)..(1085): n is a, c, g, or t
  misc_feature (1090)..(1090): n is a, c, g, or t
  misc_feature (1094)..(1094): n is a, c, g, or t
  misc_feature (1108)..(1108): n is a, c, g, or t
  misc_feature (1114)..(1114): n is a, c, g, or t
  misc_feature (1118)..(1118): n is a, c, g, or t
  misc_feature (1122)..(1122): n is a, c, g, or t
  misc_feature (1125)..(1125): n is a, c, g, or t
  misc_feature (1131)..(1131): n is a, c, g, or t
  misc_feature (1133)..(1134): n is a, c, g, or t
  misc_feature (1136)..(1136): n is a, c, g, or t
  misc_feature (1138)..(1139): n is a, c, g, or t
  misc_feature (1144)..(1144): n is a, c, g, or t
  misc_feature (1146)..(1146): n is a, c, g, or t
  misc_feature (1148)..(1148): n is a, c, g, or t
  misc_feature (1151)..(1153): n is a, c, g, or t
  misc_feature (1156)..(1157): n is a, c, g, or t
  misc_feature (1162)..(1162): n is a, c, g, or t
  misc_feature (1174)..(1174): n is a, c, g, or t
  misc_feature (1182)..(1182): n is a, c, g, or t
  misc_feature (1184)..(1185): n is a, c, g, or t
  misc_feature (1188)..(1188): n is a, c, g, or t
  misc_feature (1190)..(1190): n is a, c, g, or t
  misc_feature (1197)..(1197): n is a, c, g, or t
tnanagagaattaactatggagagggatngcatcnccattcaccatcacgggatcctatttangtganactatagnaatcgtcgacccacgcgtccgcagacacggaccccgcaggagatgggtgcccccatccgcacactgtcctttggccaccggacatcatgcctcccaagaaggatgttcccgtgaagaaaccagcagggccctccatctccaaacctgctgctaagccagcagcagcaggggctcctccagccaagaccaaagctgagccagctgtcccccaggcccctcanaaaacccaggagcctccagtcgatctctccaaagtggtgatcgagtttaacaaggaccagctggaggagttcaaggaggccttcgagctgtttgaccgagtgggggatggcaagatcctgtacagccagtgtggggacgtgatgagggccctgggccagaaccccaccaacgccgaggtgctcaaggtcctggggaaccccaagagtgatgagctgaagtcgcggcgtgtggactttgagactttcctgcccatgctccaggcagtggccaanaaccgaggccaaggcacatatgaggactacttggaggggtttcgtgtgtttgacaaggaggggaacggcaaagtcatgggagcagagctcanacntgttctcaccacccttgnagagaagatgactgaagangangtgganaccgtttctggnaggacacgaaggacagcaacggcctgcattaactnacgaagcccttcttgaaancacatccctaagcgtctgaantgctgcaaaatccntgtntgggtctggaaactgggnccccgcaangcnaaaagcacgnttncnanccnncaaggtnggccnccttnttgtttccaaatnaanaactgngtttncttccanaaaaatataataannatatnntantaactanttatanattnatatntnttntgcntctaaannttnaantaaantnnnnnttngnatctcnttcatantnngttntncnnntatcantnataaatnacaaaaaaatttatagngnggggcgcgcncnntcancncgngtccnatantattttttttaatnaatttnatancctntgntaaaancnncnanntaacncntnaannnccnntggtnattttttaaaanatttagtnannccngnttttttnttt

SEQ ID NO: 78 - DNA, 1343 bp, Homo Sapiens
  misc_feature (1)..(2): n is a, c, g, or t
  misc_feature (4)..(4): n is a, c, g, or t
  misc_feature (16)..(16): n is a, c, g, or t
  misc_feature (914)..(914): n is a, c, g, or t
  misc_feature (954)..(954): n is a, c, g, or t
  misc_feature (959)..(959): n is a, c, g, or t
  misc_feature (963)..(963): n is a, c, g, or t
  misc_feature (977)..(977): n is a, c, g, or t
  misc_feature (980)..(980): n is a, c, g, or t
  misc_feature (988)..(988): n is a, c, g, or t
  misc_feature (1010)..(1010): n is a, c, g, or t
  misc_feature (1043)..(1043): n is a, c, g, or t
  misc_feature (1065)..(1065): n is a, c, g, or t
  misc_feature (1077)..(1077): n is a, c, g, or t
  misc_feature (1080)..(1080): n is a, c, g, or t
  misc_feature (1082)..(1082): n is a, c, g, or t
  misc_feature (1088)..(1088): n is a, c, g, or t
  misc_feature (1094)..(1094): n is a, c, g, or t
  misc_feature (1099)..(1099): n is a, c, g, or t
  misc_feature (1102)..(1102): n is a, c, g, or t
  misc_feature (1106)..(1106): n is a, c, g, or t
  misc_feature (1111)..(1111): n is a, c, g, or t
  misc_feature (1130)..(1130): n is a, c, g, or t
  misc_feature (1149)..(1149): n is a, c, g, or t
  misc_feature (1155)..(1155): n is a, c, g, or t
  misc_feature (1159)..(1159): n is a, c, g, or t
  misc_feature (1165)..(1165): n is a, c, g, or t
  misc_feature (1168)..(1168): n is a, c, g, or t
  misc_feature (1171)..(1172): n is a, c, g, or t
  misc_feature (1175)..(1176): n is a, c, g, or t
  misc_feature (1178)..(1206): n is a, c, g, or t
  misc_feature (1212)..(1212): n is a, c, g, or t
  misc_feature (1223)..(1223): n is a, c, g, or t
  misc_feature (1229)..(1230): n is a, c, g, or t
  misc_feature (1234)..(1234): n is a, c, g, or t
  misc_feature (1242)..(1242): n is a, c, g, or t
  misc_feature (1247)..(1247): n is a, c, g, or t
  misc_feature (1257)..(1258): n is a, c, g, or t
  misc_feature (1268)..(1268): n is a, c, g, or t
  misc_feature (1274)..(1274): n is a, c, g, or t
  misc_feature (1279)..(1281): n is a, c, g, or t
  misc_feature (1300)..(1300): n is a, c, g, or t
  misc_feature (1314)..(1314): n is a, c, g, or t
  misc_feature (1325)..(1325): n is a, c, g, or t
  misc_feature (1327)..(1327): n is a, c, g, or t
  misc_feature (1339)..(1339): n is a, c, g, or t
nnantagagagattanctatgagaggatcgcatcaccatcaccatcacggatcctatttaggtgacactatagaatcgtcgacccacgcgtccgcagaatctagttctgtggttcgaaccagaagcaaccgagtggttgtagatccagttgtcactgagcaaccatctacttcttcagctgcaaagacttttattacaaaagctaatgcatctgcaataccagggaaaacaatactagagaattctgtgaaacattccaaagctttgaatactctttccagtcctggtcaatccagttttagtcatggcactaggaataattctgcaaaagaaaacatggaaaaggaaaagccagtcaaacgtaaaatgaagtcatctgtactcccaaaggcgtccactctttcaaagtcatcagctgtcattgagcaaggagattgtaagaacaacgctcttgtaccaggaaccattcaagtaaatggccatggaggacagccatcaaaacttgtgaagaggggacctggaaggaaacctaaagtagaagttaataccaatagtggtgaaattatacacaagaaaaggggtagaaagcccaaaaagctacagtatgcaaagccagaagatttagagcaaaataatgtgcatcccatcagagatgaagtacttccttcttcaacatgcaattttctttctgaaactaataatgtaaaggaagatttgttacagaaaaagaatcgtggaggtaggaagcccaaaaggaagatgaagacacaaaaattagatgcagatctcctagtccctgcaagtgtcaaagtgttaaggagaagtaaccgaaaaaagatagatgatcctatagatgaggaagaagagtttgaagaactcaaaggctctgaacccccatgagaactagaaatcanggtcgaaggacagctttctataatgaggatgactctgaanaggancaangcagctgttgttcnaanacccctcnttaactttggaacttctagtanaggacagtccaaagttgactgaaaagcaaagcnaatttaattggtgggaactggnaccaaaaatttnctncnaatctntaagcnggacngtnaggnaaaantaaaactaaggctccgctncctgcgccgggggggaaanggaagntttnattttnttnccnnaannannnnnnnnnnnnnnnnnnnnnnnnnnnnngggggngcccccccaanggggcnnatanctaatacnggacngggccccggnnaaacccaaangccccnaaccnnntggttttttaaaccccggngcccggggtttttngggaaaccccncntggggaatttgngaaa

SEQ ID NO: 79 - DNA, 1200 bp, Homo Sapiens
  misc_feature (850)..(850): n is a, c, g, or t
  misc_feature (867)..(867): n is a, c, g, or t
  misc_feature (892)..(892): n is a, c, g, or t
  misc_feature (899)..(899): n is a, c, g, or t
  misc_feature (911)..(912): n is a, c, g, or t
  misc_feature (915)..(915): n is a, c, g, or t
  misc_feature (919)..(919): n is a, c, g, or t
  misc_feature (932)..(932): n is a, c, g, or t
  misc_feature (934)..(934): n is a, c, g, or t
  misc_feature (948)..(948): n is a, c, g, or t
  misc_feature (956)..(956): n is a, c, g, or t
  misc_feature (975)..(975): n is a, c, g, or t
  misc_feature (980)..(980): n is a, c, g, or t
  misc_feature (989)..(989): n is a, c, g, or t
  misc_feature (1001)..(1001): n is a, c, g, or t
  misc_feature (1016)..(1016): n is a, c, g, or t
  misc_feature (1019)..(1019): n is a, c, g, or t
  misc_feature (1029)..(1029): n is a, c, g, or t
  misc_feature (1033)..(1033): n is a, c, g, or t
  misc_feature (1045)..(1045): n is a, c, g, or t
  misc_feature (1050)..(1050): n is a, c, g, or t
  misc_feature (1053)..(1055): n is a, c, g, or t
  misc_feature (1060)..(1061): n is a, c, g, or t
  misc_feature (1066)..(1066): n is a, c, g, or t
  misc_feature (1071)..(1071): n is a, c, g, or t
  misc_feature (1079)..(1079): n is a, c, g, or t
  misc_feature (1081)..(1082): n is a, c, g, or t
  misc_feature (1088)..(1092): n is a, c, g, or t
  misc_feature (1094)..(1094): n is a, c, g, or t
  misc_feature (1096)..(1097): n is a, c, g, or t
  misc_feature (1102)..(1104): n is a, c, g, or t
  misc_feature (1107)..(1107): n is a, c, g, or t
  misc_feature (1116)..(1116): n is a, c, g, or t
  misc_feature (1118)..(1119): n is a, c, g, or t
  misc_feature (1124)..(1124): n is a, c, g, or t
  misc_feature (1126)..(1126): n is a, c, g, or t
  misc_feature (1128)..(1128): n is a, c, g, or t
  misc_feature (1133)..(1133): n is a, c, g, or t
  misc_feature (1143)..(1143): n is a, c, g, or t
  misc_feature (1145)..(1147): n is a, c, g, or t
  misc_feature (1149)..(1150): n is a, c, g, or t
  misc_feature (1157)..(1160): n is a, c, g, or t
  misc_feature (1166)..(1168): n is a, c, g, or t
  misc_feature (1170)..(1173): n is a, c, g, or t
  misc_feature (1176)..(1176): n is a, c, g, or t
  misc_feature (1178)..(1178): n is a, c, g, or t
  misc_feature (1186)..(1186): n is a, c, g, or t
  misc_feature (1188)..(1188): n is a, c, g, or t
  misc_feature (1194)..(1195): n is a, c, g, or t
tagagagaattactatgagaggatcgcatcaccatcaccatcacggatcctatttaggtgacactatagaatcgtcgacccacgcgtccgggtcggaaaaaagggagaagaaaccggcaccctctctgagaggcaacagaagcagcaattgtttcagcgaaaaaagcagcaagggagggagtgaaggaaaaaagcaaaaaagggggcgacacgcaagtgcctgtaggggtgaaaggagcagggaccggcgatctagggggggatcagctacaaaagaaactgtcactgggagcggtgcggccaaggaggaagcagtgctgccaggctctgctccagggcacagctggctggcggctgccctgtccgcagcaaaggggcacaggccggggaccgcgagaggtggcaaagtggcaccgggcgccgaggctgctgagcgctcgccgagacggcgaccggactggctgccccggaactgcggcgactctccctactcagaacttggcctacgtttcccaggactctccccatctccagaggcccccacaaaaccgggaaaggaaggaaaggacagcggcggcagcagctcaatgagtgcctacagcagaaagcctgaacgagctcggtcgtaggcgggaagttcccgggggggctgcccagtgcagccgcaatgctgccgcgagctgccccagcagtccgggctccgtagacgctttccgcatcactctccttcctcgggctgccgggagtcccgggacctggcggggccggcatgacgggcttctcgggggcccgccgcacgcccggcagcctccggagacgcgcgccgagcccggctcccacggcctctgangctcggcgggggctgcngctgcctggcgggcgggctccgganctttctngagcggcattannccncggnttggccccggacncnaccaaaggctcttntggaaaancccaaaacactgggcatcnttacnacctgtaanttgaggccaccnaattgctactcccgntcnccttttggcnattntttttttaaccntccgnaannnttcannatccnacccnccgggggntnntcccannnnngnannacccnnnaantttcctttngnnaaaangnangaaanccaacccctngnnnanntgccctnnnnttttcnnncnnnnttnantccccccngnaaaggnncctaa

SEQ ID NO: 80 - DNA, 1250 bp, Homo Sapiens
actcctataagagggagattaactatgagaggatcgcatcaccatcaccatcacggatcctatttaggtgacactatagaatcgtcgacccacgcgtccgccgagtccgcggcggcgtccagggtcggcagcaaccgcagccgagcccgagcgggtggcggcgccatggcgtgcgcggggctgctcaccgtgtgcctgctccggccgcccgcgccccagccccagccccagaccccgcggcacccccagctcgcgcccgacccggggcccgccggacacacgctcttccaggacgttttccgcagagcagacaagaatggagtacgagagggcctccaaagtggaccagtttgtgacgcgcttcctgctgcgggagacggtgagccagctgcaagcccttcagagctcgctggagggggcgtcagataccctggaggcccaggcccatggctggcggtcagatgcagagagcgtggaggcgcagagcaggctctgcggcagccggcgggcaggacgccgagccctgaggagtgtcagccggtcatccacctggtcccccggctcttctgacacagggcgcagctcagaggccgagatgcagtggcggctccaggtgaaccgcctccaggagctcatcgaccagctcgagtgcaagcacatcctcatggcccagaggcaggtccaggtggcagaggaaggcctgcaggacttccaccgagccctgcgctgctatgtggacttcacaggggcccagagccattgtctgcatgtgtccgcccagaagatgctggacggtgcctccttcaccctgtatgagttctggcaggatgaggcctcctggagaaggcaccagcagtcgcctggcagcaaggccttccagcgcatcctcatcgaccacctgcgggccccggacaccctcaccactgtgttcttcccagcctcctggtggataatgaataacaactgagccagacctgcacacgccgagggcctcgggaccctgccctgcctccctctggagcccttctggactggcccagcccagcgcaagaccaggcttgtctcctccttgactgggcctgtgagctcctcagctcaggatcaggactgggctgctgctttctatttattattgataattatcctgtattttaattgttgttcaccttcagcttcaagctacttgccttcgcctgtcaggcaactggaatccggactgccgtcctgcctggactgaagcgcacccaagt

SEQ ID NO: 81 - DNA, 1303 bp, Homo Sapiens
  misc_feature (895)..(895): n is a, c, g, or t
  misc_feature (950)..(1036): n is a, c, g, or t
  misc_feature (1043)..(1043): n is a, c, g, or t
  misc_feature (1062)..(1062): n is a, c, g, or t
  misc_feature (1065)..(1066): n is a, c, g, or t
  misc_feature (1069)..(1069): n is a, c, g, or t
  misc_feature (1072)..(1073): n is a, c, g, or t
  misc_feature (1078)..(1079): n is a, c, g, or t
  misc_feature (1082)..(1085): n is a, c, g, or t
  misc_feature (1089)..(1089): n is a, c, g, or t
  misc_feature (1094)..(1094): n is a, c, g, or t
  misc_feature (1096)..(1096): n is a, c, g, or t
  misc_feature (1099)..(1099): n is a, c, g, or t
  misc_feature (1102)..(1102): n is a, c, g, or t
  misc_feature (1104)..(1105): n is a, c, g, or t
  misc_feature (1110)..(1111): n is a, c, g, or t
  misc_feature (1115)..(1116): n is a, c, g, or t
  misc_feature (1119)..(1119): n is a, c, g, or t
  misc_feature (1121)..(1122): n is a, c, g, or t
  misc_feature (1127)..(1127): n is a, c, g, or t
  misc_feature (1137)..(1139): n is a, c, g, or t
  misc_feature (1142)..(1143): n is a, c, g, or t
  misc_feature (1151)..(1151): n is a, c, g, or t
  misc_feature (1156)..(1156): n is a, c, g, or t
  misc_feature (1160)..(1160): n is a, c, g, or t
  misc_feature (1162)..(1162): n is a, c, g, or t
  misc_feature (1178)..(1178): n is a, c, g, or t
  misc_feature (1199)..(1199): n is a, c, g, or t
  misc_feature (1202)..(1202): n is a, c, g, or t
  misc_feature (1205)..(1209): n is a, c, g, or t
  misc_feature (1216)..(1216): n is a, c, g, or t
  misc_feature (1226)..(1226): n is a, c, g, or t
  misc_feature (1230)..(1235): n is a, c, g, or t
  misc_feature (1237)..(1237): n is a, c, g, or t
  misc_feature (1239)..(1241): n is a, c, g, or t
  misc_feature (1243)..(1244): n is a, c, g, or t
  misc_feature (1247)..(1247): n is a, c, g, or t
  misc_feature (1251)..(1251): n is a, c, g, or t
  misc_feature (1262)..(1263): n is a, c, g, or t
  misc_feature (1268)..(1270): n is a, c, g, or t
  misc_feature (1276)..(1278): n is a, c, g, or t
  misc_feature (1280)..(1281): n is a, c, g, or t
  misc_feature (1283)..(1286): n is a, c, g, or t
  misc_feature (1290)..(1290): n is a, c, g, or t
  misc_feature (1295)..(1297): n is a, c, g, or t
  misc_feature (1299)..(1300): n is a, c, g, or t
tagagaaattactatgagaggatcgcatcaccatcaccatcacggatcctatttaggtgacactatagaatcgtcgacccacgcgtccgcacacactggggagaagccgtatgtttgtggggtgtgtgggcgaggctttagtctcaagtcacacctcaacagacaccagaacatacactcaggagagaagcccattgtgtgcaaggactgtggccggggcttcagccagcaatccaacctcatcagacaccagaggacgcactcaggcgagaagcccatggtgtgtggggagtgcgggcgaggcttcagccagaagtcaaaccttgttgcacaccagaggacgcactcaggggagaggccgtatgtgtgccgagagtgcgggcgaggctttagccaccaggccggtctcatcaggcacaagcggaagcactcgagggagaagccctacatgtgcaggcagtgtggactgggctttggcaataagtcagctctaattacacacaagcgggctcactcggaagagaagccttgtgtgtgcagagagtgtggccaaggctttctccaaaagtcacacctcaccttacatcaaatgacacatacgggggagaagccatatgtgtgcaagacgtgtgggcggggcttcagcctcaagtctcacctcagcagacacaggaagaccacgtctgtccaccacagactgccagtgcagcccgaccctgagccgtgtgcagggcaaccttcggattccttatactctctctgaaggcaaagatggggacaaggactaagagtcagaatgttgacactttgatgaaatggagtaaagaaatgcattctgtaagtggtcaaaggacatttgactgtttactttctccacactaagtcttctccatgnttttgtggccttcggttgtaataaacttggcttctttatacatctgtaaaaaaannnnnnnnnnnnnnnnnnnnnnnnnnnnnnnnnnnnnnnnnnnnnnnnnnnnnnnnnnnnnnnnnnnnnnnnnnnnnnnnnnnnnnnggggggncccccccccaaaagggggnccnnttnaannttaannaannnnaacnttggncnccnggntnnaaaanncccnnaangnnccccnaaaacccccnnnggnntttttttnaaaancccngntttcccccccgggggntttttttttttggggaaaaanccnacnnnnntttgggnaaattttttngggnnnnnngnannntnnaangggnaaaaaaatccnngggannncccccnnntnnannnncccnggggnnncnnaaa

SEQ ID NO: 82 - DNA, 1368 bp, Homo Sapiens
  misc_feature (836)..(836): n is a, c, g, or t
  misc_feature (896)..(896): n is a, c, g, or t
  misc_feature (923)..(923): n is a, c, g, or t
  misc_feature (960)..(960): n is a, c, g, or t
  misc_feature (972)..(972): n is a, c, g, or t
  misc_feature (1023)..(1023): n is a, c, g, or t
  misc_feature (1042)..(1043): n is a, c, g, or t
  misc_feature (1049)..(1049): n is a, c, g, or t
  misc_feature (1058)..(1058): n is a, c, g, or t
  misc_feature (1065)..(1065): n is a, c, g, or t
  misc_feature (1067)..(1067): n is a, c, g, or t
  misc_feature (1085)..(1085): n is a, c, g, or t
  misc_feature (1090)..(1090): n is a, c, g, or t
  misc_feature (1098)..(1098): n is a, c, g, or t
  misc_feature (1100)..(1100): n is a, c, g, or t
  misc_feature (1103)..(1103): n is a, c, g, or t
  misc_feature (1108)..(1108): n is a, c, g, or t
  misc_feature (1118)..(1118): n is a, c, g, or t
  misc_feature (1122)..(1122): n is a, c, g, or t
  misc_feature (1133)..(1133): n is a, c, g, or t
  misc_feature (1139)..(1140): n is a, c, g, or t
  misc_feature (1162)..(1162): n is a, c, g, or t
  misc_feature (1166)..(1166): n is a, c, g, or t
  misc_feature (1172)..(1172): n is a, c, g, or t
  misc_feature (1174)..(1174): n is a, c, g, or t
  misc_feature (1177)..(1177): n is a, c, g, or t
  misc_feature (1183)..(1183): n is a, c, g, or t
  misc_feature (1189)..(1189): n is a, c, g, or t
  misc_feature (1193)..(1193): n is a, c, g, or t
  misc_feature (1198)..(1198): n is a, c, g, or t
  misc_feature (1211)..(1211): n is a, c, g, or t
  misc_feature (1216)..(1217): n is a, c, g, or t
  misc_feature (1222)..(1222): n is a, c, g, or t
  misc_feature (1230)..(1231): n is a, c, g, or t
  misc_feature (1236)..(1237): n is a, c, g, or t
  misc_feature (1243)..(1243): n is a, c, g, or t
  misc_feature (1246)..(1246): n is a, c, g, or t
  misc_feature (1252)..(1253): n is a, c, g, or t
  misc_feature (1261)..(1261): n is a, c, g, or t
  misc_feature (1264)..(1264): n is a, c, g, or t
  misc_feature (1268)..(1269): n is a, c, g, or t
  misc_feature (1271)..(1271): n is a, c, g, or t
  misc_feature (1275)..(1275): n is a, c, g, or t
  misc_feature (1278)..(1278): n is a, c, g, or t
  misc_feature (1292)..(1294): n is a, c, g, or t
  misc_feature (1296)..(1296): n is a, c, g, or t
  misc_feature (1303)..(1303): n is a, c, g, or t
  misc_feature (1307)..(1307): n is a, c, g, or t
  misc_feature (1312)..(1312): n is a, c, g, or t
  misc_feature (1337)..(1337): n is a, c, g, or t
  misc_feature (1341)..(1341): n is a, c, g, or t
  misc_feature (1347)..(1347): n is a, c, g, or t
  misc_feature (1356)..(1356): n is a, c, g, or t
  misc_feature (1361)..(1361): n is a, c, g, or t
  misc_feature (1365)..(1365): n is a, c, g, or t
  misc_feature (1367)..(1367): n is a, c, g, or t
tagagaaattactatgagaggatcgcatcaccatcaccatcacggatcctatttaggtgacactatagaatcgtcgacccacgcgtccgggcggttcgggagccgcggcttatggtgcagacatggccaagtccaagaaccacaccacacacaaccagtcccgaaaatggcacagaaatggtatcaagaaaccccgatcacaaagatacgaatctcttaagggggtggaccccaagttcctgaggaacatgcgctttgccaagaagcacaacaaaaagggcctaaagaagatgcaggccaacaatgccaaggccatgagtgcacgtgccgaggctatcaaggccctcgtaaagcccaaggaggttaagcccaagatcccaaagggtgtcagccgcaagctcgatcgacttgcctacattgcccaccccaagcttgggaagcgtgctcgtgcccgtattgccaaggggctcaggctgtgccggccaaaggccaaggccaaggccaaggccaaggccaaggatcaaaccaaggcccaggctgcagccccagcttcagttccagctcaggctcccaaacgtacccaggcccctacaaaggcttcagagtagatatctctgccaacatgaggacagaaggactggtgcgaccccccacccccgcccctgggctaccatctgcatggggctggggtcctcctgtgctatttgtacaaataaacctgaggcaggaaaaaaaaaaaaaaaaaaaaaaaagggcggccgctccctatagtgagtcgtattaagcttaattagctgagcttggactcctgttgatagatccagtaatgacctcanaactccatctggatttgttcaaaacgctcggttgccgccgggcgttttttttttggtganaatccaagctagcttggcgaaattttncaggagctaaggaagctaaaatgggagaaaaaaatcnctggatataccnccgttgatatatccccaatggcatcgtaaaaaaaattttgaggcatttcantcagttgctcatgtacctnnaaccanaccgttcanctggatntnacggcctttttaaaaacngtaanaaaataancncanttttntccggccttnttcncattttgcccncctgannatgcccctccgaatttctatgnaatnaaaaangnaanctgggnaatggnaaantttcnccttttttacccnttttnntgaanaatgaaannttttnnccttgnagnaaaccnnaaaattcnggntttnnancaanttncaaaaggggggttnnngnaaaacgncccntttcnaaggtttttaaaatttttccccccncccngggganttccctttnttaanggcnana

SEQ ID NO: 83 - DNA, 1200 bp, Homo Sapiens
  misc_feature (1)..(1): n is a, c, g, or t
  misc_feature (883)..(883): n is a, c, g, or t
  misc_feature (915)..(915): n is a, c, g, or t
  misc_feature (944)..(944): n is a, c, g, or t
  misc_feature (946)..(946): n is a, c, g, or t
  misc_feature (950)..(950): n is a, c, g, or t
  misc_feature (967)..(967): n is a, c, g, or t
  misc_feature (975)..(975): n is a, c, g, or t
  misc_feature (987)..(988): n is a, c, g, or t
  misc_feature (1000)..(1000): n is a, c, g, or t
  misc_feature (1012)..(1012): n is a, c, g, or t
  misc_feature (1015)..(1015): n is a, c, g, or t
  misc_feature (1032)..(1032): n is a, c, g, or t
  misc_feature (1037)..(1040): n is a, c, g, or t
  misc_feature (1051)..(1051): n is a, c, g, or t
  misc_feature (1054)..(1055): n is a, c, g, or t
  misc_feature (1058)..(1058): n is a, c, g, or t
  misc_feature (1067)..(1067): n is a, c, g, or t
  misc_feature (1079)..(1079): n is a, c, g, or t
  misc_feature (1093)..(1093): n is a, c, g, or t
  misc_feature (1102)..(1102): n is a, c, g, or t
  misc_feature (1104)..(1104): n is a, c, g, or t
  misc_feature (1133)..(1133): n is a, c, g, or t
  misc_feature (1158)..(1158): n is a, c, g, or t
  misc_feature (1160)..(1160): n is a, c, g, or t
  misc_feature (1162)..(1162): n is a, c, g, or t
  misc_feature (1166)..(1166): n is a, c, g, or t
  misc_feature (1170)..(1170): n is a, c, g, or t
  misc_feature (1176)..(1176): n is a, c, g, or t
  misc_feature (1186)..(1186): n is a, c, g, or t
  misc_feature (1190)..(1190): n is a, c, g, or t
  misc_feature (1194)..(1195): n is a, c, g, or t
naaaagagaaattactatgagaggatcgcatcaccatcaccatcacggatcctatttaggtgacactatagaatcgtcgacccacgcgtccggcctgagcctgagcctgagcccgagccgggagccggtcgcgggggctccgggctgtgggaccgctgggcccccagcgatggcgaccctgtggggaggccttcttcggcttggctccttgctcagcctgtcgtgcctggcgctttccgtgctgctgctggcgcagctgtcagacgccgccaagaatttcgaggatgtcagatgtaaatgtatctgccctccctataaagaaaattctgggcatatttataataagaacatatctcagaaagattgtgattgccttcatgtcgtggagcccatgcctgtgcgggggcctgatgtagaagcatactgtctacgctgtgaatgcaaatatgaagaaagaagctctgtcacaatcaaggttaccattataatttatctctccattttgggccttctacttctgtacatggtatatcttactctggttgagcccatactgaagaggcgcctctttggacatgcacagttgatacagagtgatgatgatattggggatcaccagccttttgcaaatgcacacgatgtgctagcccgctcccgcagtcgagccaacgtgctgaacaaggtagaatatgcacagcagcgctggaagcttcaagtccaagagcagcgaaagtctgtctttgaccggcatgttgtcctcagctaattgggaattgaattcaaggtgactagaaagaaacaggcagacaactggaaagaactgactgggttttgctgggtttcattttaataccttgttgatttcaccaactgttgctggaanaatcaaaactggaagcaaaaaacttgcttgantttttttttcttgttaacgtaataaaaananaaantttttaaaagcccacanctcaaagncagcccaaaaannccttttccctantttgggactttnacnaaaaaaaaaaaaaatcntgccnnnnaaattatcttngannccntttacctgnaaaaagcccctnctttttttcccccnaaaattttnancttgactttcaaaaaaaattttccggggnttttgggggggggtggttttttggntngnttgntttngggggnaaaagggaangaancccnnggaaa

SEQ ID NO: 84 - DNA, 1030 bp, Homo Sapiens
  misc_feature (7)..(9): n is a, c, g, or t
  misc_feature (13)..(13): n is a, c, g, or t
  misc_feature (630)..(630): n is a, c, g, or t
  misc_feature (637)..(637): n is a, c, g, or t
  misc_feature (642)..(642): n is a, c, g, or t
  misc_feature (644)..(644): n is a, c, g, or t
  misc_feature (658)..(658): n is a, c, g, or t
  misc_feature (675)..(675): n is a, c, g, or t
  misc_feature (699)..(699): n is a, c, g, or t
  misc_feature (706)..(706): n is a, c, g, or t
  misc_feature (708)..(708): n is a, c, g, or t
  misc_feature (711)..(711): n is a, c, g, or t
  misc_feature (713)..(713): n is a, c, g, or t
  misc_feature (718)..(718): n is a, c, g, or t
  misc_feature (720)..(720): n is a, c, g, or t
  misc_feature (729)..(729): n is a, c, g, or t
  misc_feature (733)..(733): n is a, c, g, or t
  misc_feature (736)..(736): n is a, c, g, or t
  misc_feature (744)..(744): n is a, c, g, or t
  misc_feature (751)..(752): n is a, c, g, or t
  misc_feature (755)..(755): n is a, c, g, or t
  misc_feature (762)..(762): n is a, c, g, or t
  misc_feature (773)..(773): n is a, c, g, or t
  misc_feature (776)..(776): n is a, c, g, or t
  misc_feature (781)..(781): n is a, c, g, or t
  misc_feature (791)..(794): n is a, c, g, or t
  misc_feature (796)..(796): n is a, c, g, or t
  misc_feature (798)..(799): n is a, c, g, or t
  misc_feature (801)..(801): n is a, c, g, or t
  misc_feature (803)..(803): n is a, c, g, or t
  misc_feature (807)..(808): n is a, c, g, or t
  misc_feature (811)..(811): n is a, c, g, or t
  misc_feature (814)..(814): n is a, c, g, or t
  misc_feature (820)..(820): n is a, c, g, or t
  misc_feature (831)..(831): n is a, c, g, or t
  misc_feature (844)..(844): n is a, c, g, or t
  misc_feature (847)..(849): n is a, c, g, or t
  misc_feature (852)..(852): n is a, c, g, or t
  misc_feature (854)..(856): n is a, c, g, or t
  misc_feature (859)..(859): n is a, c, g, or t
  misc_feature (863)..(864): n is a, c, g, or t
  misc_feature (870)..(871): n is a, c, g, or t
  misc_feature (875)..(875): n is a, c, g, or t
  misc_feature (880)..(880): n is a, c, g, or t
  misc_feature (882)..(882): n is a, c, g, or t
  misc_feature (885)..(886): n is a, c, g, or t
  misc_feature (890)..(890): n is a, c, g, or t
  misc_feature (906)..(906): n is a, c, g, or t
  misc_feature (908)..(908): n is a, c, g, or t
  misc_feature (912)..(917): n is a, c, g, or t
  misc_feature (926)..(927): n is a, c, g, or t
  misc_feature (929)..(929): n is a, c, g, or t
  misc_feature (931)..(932): n is a, c, g, or t
  misc_feature (934)..(935): n is a, c, g, or t
  misc_feature (937)..(937): n is a, c, g, or t
  misc_feature (941)..(942): n is a, c, g, or t
  misc_feature (944)..(944): n is a, c, g, or t
  misc_feature (946)..(946): n is a, c, g, or t
  misc_feature (964)..(964): n is a, c, g, or t
  misc_feature (967)..(967): n is a, c, g, or t
  misc_feature (969)..(972): n is a, c, g, or t
  misc_feature (978)..(978): n is a, c, g, or t
  misc_feature (980)..(980): n is a, c, g, or t
  misc_feature (984)..(985): n is a, c, g, or t
  misc_feature (989)..(1009): n is a, c, g, or t
  misc_feature (1011)..(1011): n is a, c, g, or t
  misc_feature (1015)..(1017): n is a, c, g, or t
  misc_feature (1021)..(1028): n is a, c, g, or t
cattttnnnggantaactatgagagggatcgcatcaccatcaccatcacgggatcctatttaggtgacactatagaatcgtcgacccacgcgtccgcccacgcgtccgcccacgcgtccgctccgcgcctcgcgctatgggacagagcccccgatccgccagcaccacctgaggatccagaaaccgccccagcgatggaagaggatcaggagctggagaggaaagcaatagaagaactgcttaaggaggcaaaacgtgggaaaactagagctgaaacaatgggacccatgggttggatgaagtgtcctcttgctagcaccaataaaagatttctaattaacacaattaaaaacacattgccctctcataaagagcaagaccatgaacaaaaagagggcgataaggaaccagccaagagccaggcccagaaagaagaaaacccaaagaaacacagaagccatccttacaagcacagcttccgcgctcgaggttccgccagttactccccgccacgaaagcggagcagccaggacaagtacgaaaagcggtccaaccggcggtgaggctggaaccagggccagccagccctgcgggcctccgtgctccttcggggtgcggtgtgcggagaangcctganctggnanggcaaacacctganagtgactttgacattangtcctttgttgtttttaaagaggntgctggncncangnaaaananaaaaatganctancanctcttgangaaacanntgnaaaggangatgtcttggnaanttaanctacttctgnnnngnannananttanntantgntgttancttgttggaantgggtttcaaaanaannntgncnnnaantttnngttttnnaaanattgnanaanngggnttcaaatttttttggntntttnnnnnnaaaaataannancnnannantccnnanantttaattttttggggggnaantnnnntttaananttannaaannnnnnnnnnnnnnnnnnnnntntttnnnaaannnnnnnncc

SEQ ID NO: 85 - DNA, 1368 bp, Homo Sapiens
  misc_feature (790)..(790): n is a, c, g, or t
  misc_feature (836)..(836): n is a, c, g, or t
  misc_feature (863)..(864): n is a, c, g, or t
  misc_feature (871)..(871): n is a, c, g, or t
  misc_feature (889)..(889): n is a, c, g, or t
  misc_feature (896)..(896): n is a, c, g, or t
  misc_feature (930)..(930): n is a, c, g, or t
  misc_feature (935)..(935): n is a, c, g, or t
  misc_feature (944)..(944): n is a, c, g, or t
  misc_feature (948)..(949): n is a, c, g, or t
  misc_feature (971)..(971): n is a, c, g, or t
  misc_feature (979)..(979): n is a, c, g, or t
  misc_feature (985)..(986): n is a, c, g, or t
  misc_feature (988)..(988): n is a, c, g, or t
  misc_feature (991)..(999): n is a, c, g, or t
  misc_feature (1001)..(1007): n is a, c, g, or t
  misc_feature (1009)..(1022): n is a, c, g, or t
  misc_feature (1025)..(1025): n is a, c, g, or t
  misc_feature (1027)..(1039): n is a, c, g, or t
  misc_feature (1041)..(1042): n is a, c, g, or t
  misc_feature (1044)..(1062): n is a, c, g, or t
  misc_feature (1064)..(1065): n is a, c, g, or t
  misc_feature (1067)..(1073): n is a, c, g, or t
  misc_feature (1076)..(1129): n is a, c, g, or t
  misc_feature (1131)..(1368): n is a, c, g, or t
gagaaattactatgagaggatcgcatcaccatcaccatcacggatcctatttaggtgacactatagaatcgtcgacccacgcgtccgaaggagacgaagtcacactcatctgctctgcccgcggccatccagaccccaaactcagctggagccaattggggggcagccccgcagagccaatccccggacggcagggttgggtgagcagctctctgaccctgaaagtgaccagcgccctgagccgcgatggcatctcctgtgaagcctccaacccccacgggaacaagcgccatgtcttccacttcggcaccgtgagcccccagacctcccaggctggagtggccgtcatggccgtggccgtcagcgtgggcctcctgctcctcgtcgttgctgtcttctactgcgtgagacgcaaagggggcccctgctgccgccagcggcgggagaagggggctccgccgccaggggagccagggctgagccactcggggtcggagcaaccagagcagaccggccttctcatgggaggtgcctccggaggagccaggggtggcagcgggggcttcggagacgagtgctgagccaagaacctcctagaggctgtccctggacctggagctgcaggcatcagagaaccagccctgctcacgccatgcccgcccccgccttccctcttccctcttccctctccctgcccagccctcccttccttcctctgccggcaaggcagggacccacagtggctgcctgcctccgggagggaaggaaagggagggtgggtgggtggganggggccttcctccagggaatgtgactctcccaggccccaaaaatanctcctggacccaagcccaaaggcccannctggganaaaggctcccaagggtcnggctggnccggaactattttttacctcccgccttcccctgntgggncccccaccntganntcttgctgcaaaatctgaaaantggattcncccccnntnacnnnnnnnnngnnnnnnntnnnnnnnnnnnnnnaantnnnnnnnnnnnnntnnannnnnnnnnnnnnnnnnnnannannnnnnnttnnnnnnnnnnnnnnnnnnnnnnnnnnnnnnnnnnnnnnnnnnnnnnnnnnnnnnannnnnnnnnnnnnnnnnnnnnnnnnnnnnnnnnnnnnnnnnnnnnnnnnnnnnnnnnnnnnnnnnnnnnnnnnnnnnnnnnnnnnnnnnnnnnnnnnnnnnnnnnnnnnnnnnnnnnnnnnnnnnnnnnnnnnnnnnnnnnnnnnnnnnnnnnnnnnnnnnnnnnnnnnnnnnnnnnnnnnnnnnnnnnnnnnnnnnnnnnnnnnnnnnnnnnnnnnnnnnnnnnnnnnnnnnnnnnn

SEQ ID NO: 86 - DNA, 1343 bp, Homo Sapiens
  misc_feature (879)..(879): n is a, c, g, or t
  misc_feature (916)..(916): n is a, c, g, or t
  misc_feature (950)..(950): n is a, c, g, or t
  misc_feature (982)..(982): n is a, c, g, or t
  misc_feature (987)..(987): n is a, c, g, or t
  misc_feature (991)..(991): n is a, c, g, or t
  misc_feature (993)..(993): n is a, c, g, or t
  misc_feature (1015)..(1015): n is a, c, g, or t
  misc_feature (1019)..(1020): n is a, c, g, or t
  misc_feature (1038)..(1038): n is a, c, g, or t
  misc_feature (1040)..(1040): n is a, c, g, or t
  misc_feature (1042)..(1042): n is a, c, g, or t
  misc_feature (1045)..(1045): n is a, c, g, or t
  misc_feature (1088)..(1088): n is a, c, g, or t
  misc_feature (1097)..(1097): n is a, c, g, or t
  misc_feature (1101)..(1101): n is a, c, g, or t
  misc_feature (1107)..(1107): n is a, c, g, or t
  misc_feature (1116)..(1116): n is a, c, g, or t
  misc_feature (1120)..(1120): n is a, c, g, or t
  misc_feature (1124)..(1124): n is a, c, g, or t
  misc_feature (1134)..(1134): n is a, c, g, or t
  misc_feature (1137)..(1137): n is a, c, g, or t
  misc_feature (1149)..(1149): n is a, c, g, or t
  misc_feature (1164)..(1164): n is a, c, g, or t
  misc_feature (1176)..(1176): n is a, c, g, or t
  misc_feature (1187)..(1188): n is a, c, g, or t
  misc_feature (1194)..(1194): n is a, c, g, or t
  misc_feature (1197)..(1198): n is a, c, g, or t
  misc_feature (1202)..(1203): n is a, c, g, or t
  misc_feature (1208)..(1208): n is a, c, g, or t
  misc_feature (1210)..(1212): n is a, c, g, or t
  misc_feature (1220)..(1220): n is a, c, g, or t
  misc_feature (1230)..(1230): n is a, c, g, or t
  misc_feature (1234)..(1234): n is a, c, g, or t
  misc_feature (1237)..(1237): n is a, c, g, or t
  misc_feature (1239)..(1239): n is a, c, g, or t
  misc_feature (1243)..(1243): n is a, c, g, or t
  misc_feature (1249)..(1249): n is a, c, g, or t
  misc_feature (1251)..(1252): n is a, c, g, or t
  misc_feature (1254)..(1255): n is a, c, g, or t
  misc_feature (1259)..(1259): n is a, c, g, or t
  misc_feature (1266)..(1266): n is a, c, g, or t
  misc_feature (1273)..(1274): n is a, c, g, or t
  misc_feature (1276)..(1278): n is a, c, g, or t
  misc_feature (1282)..(1282): n is a, c, g, or t
  misc_feature (1292)..(1293): n is a, c, g, or t
  misc_feature (1301)..(1301): n is a, c, g, or t
  misc_feature (1305)..(1320): n is a, c, g, or t
  misc_feature (1322)..(1323): n is a, c, g, or t
  misc_feature (1326)..(1326): n is a, c, g, or t
  misc_feature (1336)..(1338): n is a, c, g, or t
  misc_feature (1343)..(1343): n is a, c, g, or t
attagagaaattactatgagaggatcgcatcaccatcaccatcacggatcctatttaggtgacactatagaatcgtcgacccacgcgtccgggcgaggactcggctgtgttgatggagagactgtgcaagtacatctacgccaaggaccgcacagaccggatccgcacatgtgccatcctctgccacatctaccaccatgctctgcactcgcgctggtaccaggcccgcgacctcatgctcatgagccacttgcaggacaacattcagcatgcagacccgccagtgcagatcctttacaaccgcaccatggtgcagctgggcatctgtgccttccgccaaggcctgaccaaggacgcacacaacgccctgctggacatccagtcgagtggccgagccaaggagcttctgggccagggcctgctgctgcgcagcctgcaggagcgcaaccaggagcaggagaaggtggagcggcgccgtcaggtccccttccacctgcacatcaacctggagctgctggagtgtgtctacctggtgtctgccatgctcctggagatcccctacatggccgcccatgagagcgatgcccgccgacgcatgatcagcaagcagttccaccaccagctgcgcgtgggcgagcgacagcccctgctgggtccccctgagtccatgcgggaacatgtggtcgctgcctccaaggccatgaagatgggtgactggaagacctgtcacagttttatcatcaatgagaagatgaatgggaaagtgtgggaccttttccccgaggctgacaaagtccgcaccatgctggttaggaagatccaggaagagtcactgaggacctacctcttcacctacagcagtgtctatgactccatcancatggagacgctgtcaaaatgtttgaactggatctgncccactgtgcactccatcatcagcaaaatgatcnttaatgaggagctgatggcctccctggaccanccaanacananagtggtgatgcaccgcactgancccnntgcccaaaaaaacttggntntncanctggccaaaaactggccacctggtgaaaaaacaaagggtgttnaaccaaaanaggnacttangggggctanttcnaaanccaaaagganggntaccccaaaacnagggttaatgccccnggggggttaccncaaaaaaattnnaaaagnctnntgannttccntnnntttccccngggccttcancttnaancnaacnaccccnanncnnaaangcttttnaattttnngnnnattnttttccccannaaaaaaanaaannnnnnnnnnnnnnnnannggncccccctatnnnttatn

SEQ ID NO: 87 - DNA, 1200 bp, Homo Sapiens
  misc_feature (1)..(1): n is a, c, g, or t
  misc_feature (16)..(16): n is a, c, g, or t
  misc_feature (740)..(740): n is a, c, g, or t
  misc_feature (776)..(776): n is a, c, g, or t
  misc_feature (804)..(804): n is a, c, g, or t
  misc_feature (816)..(816): n is a, c, g, or t
  misc_feature (840)..(840): n is a, c, g, or t
  misc_feature (844)..(844): n is a, c, g, or t
  misc_feature (866)..(866): n is a, c, g, or t
  misc_feature (891)..(891): n is a, c, g, or t
  misc_feature (894)..(894): n is a, c, g, or t
  misc_feature (906)..(906): n is a, c, g, or t
  misc_feature (916)..(916): n is a, c, g, or t
  misc_feature (930)..(930): n is a, c, g, or t
  misc_feature (935)..(935): n is a, c, g, or t
  misc_feature (938)..(938): n is a, c, g, or t
  misc_feature (961)..(961): n is a, c, g, or t
  misc_feature (973)..(973): n is a, c, g, or t
  misc_feature (975)..(975): n is a, c, g, or t
  misc_feature (982)..(982): n is a, c, g, or t
  misc_feature (986)..(986): n is a, c, g, or t
  misc_feature (988)..(988): n is a, c, g, or t
  misc_feature (996)..(996): n is a, c, g, or t
  misc_feature (1005)..(1005): n is a, c, g, or t
  misc_feature (1008)..(1008): n is a, c, g, or t
  misc_feature (1013)..(1013): n is a, c, g, or t
  misc_feature (1024)..(1024): n is a, c, g, or t
  misc_feature (1032)..(1032): n is a, c, g, or t
  misc_feature (1034)..(1034): n is a, c, g, or t
  misc_feature (1036)..(1036): n is a, c, g, or t
  misc_feature (1038)..(1038): n is a, c, g, or t
  misc_feature (1047)..(1047): n is a, c, g, or t
  misc_feature (1054)..(1054): n is a, c, g, or t
  misc_feature (1059)..(1059): n is a, c, g, or t
  misc_feature (1070)..(1070): n is a, c, g, or t
  misc_feature (1075)..(1075): n is a, c, g, or t
  misc_feature (1078)..(1079): n is a, c, g, or t
  misc_feature (1082)..(1082): n is a, c, g, or t
  misc_feature (1091)..(1091): n is a, c, g, or t
  misc_feature (1099)..(1099): n is a, c, g, or t
  misc_feature (1103)..(1103): n is a, c, g, or t
  misc_feature (1105)..(1105): n is a, c, g, or t
  misc_feature (1109)..(1111): n is a, c, g, or t
  misc_feature (1114)..(1114): n is a, c, g, or t
  misc_feature (1118)..(1119): n is a, c, g, or t
  misc_feature (1130)..(1130): n is a, c, g, or t
  misc_feature (1135)..(1135): n is a, c, g, or t
  misc_feature (1144)..(1145): n is a, c, g, or t
  misc_feature (1151)..(1151): n is a, c, g, or t
  misc_feature (1153)..(1155): n is a, c, g, or t
  misc_feature (1157)..(1158): n is a, c, g, or t
  misc_feature (1160)..(1163): n is a, c, g, or t
  misc_feature (1165)..(1165): n is a, c, g, or t
  misc_feature (1167)..(1172): n is a, c, g, or t
  misc_feature (1175)..(1176): n is a, c, g, or t
  misc_feature (1180)..(1182): n is a, c, g, or t
  misc_feature (1186)..(1191): n is a, c, g, or t
  misc_feature (1193)..(1193): n is a, c, g, or t
  misc_feature (1196)..(1200): n is a, c, g, or t
naattagagaaattanctatgagaggatcgcatcaccatcaccatcacggatcctatttaggtgacactatagaatcgtcgacccacgcgtccgtgcagagcaatgacgaggtgttggctgaggtgacttcgtgggacctgcccccgttgactgaccgctaccgcagggcctgccagagcctggggcaaggggagcaccaacaggtgctgcaggccgtggagctccagggcttgggcctctcgttcagcgcctgctccctggccctggaccaggcccagcttacacccctgctgcgggccctcaagctgcacacagcactccgggagctgcgcctggcagggaaccggctgggggacaagtgtgtggctgagctggtggctgccctgggcaccatgcccagcctggccctccttgacctctcctccaatcacctgggtcccgaaggcctgcgccagcttgccatggggctcccaggccaagccaccttgcagagtttggaggagctggacttaagcatgaaccccctgggggacggctgtggccagtccctggcctccctcctgcacgcctgccccttactcagcaccctgcgcctgcaggcgtgtggcttcggccccagcttctttctgagccaccagacagcactgggtagtgctttccaagatgctgagcacctgaagaccctgtccctgtcctacaacgccctgggagcccctgccctggccaggaccctgcagancctgcccgccggcaccctcctgcacttaaagctcanctccgtggcagccggcaagggtgattcngacctcatggancctgtattccgatacctggccaangaangctgtgctctaacccacctgancctgtctgcaaaccacctggggganaangctgttaaaaanctgtgcaaangtctctctctgtgnccctncantcatctcactggatttgtctgcnaaccctgaaatnanctgtgcnactngnaaaactcntgtccaccntcnaaaancggccccaagncttaactncntngnctgtcaggntgccccntcaanggtccctgggnctggnctnnggnaaaaaaaancccccaantccngnaaannnaantttnnaaaaaaacctnttccntaaaaaaannaaaccntnnncnntnnnncnannnnnnggnncccnnnaaannnnnntnaannnnn

SEQ ID NO: 88 - DNA, 1382 bp, Homo Sapiens
  misc_feature (911)..(911): n is a, c, g, or t
  misc_feature (916)..(916): n is a, c, g, or t
  misc_feature (923)..(923): n is a, c, g, or t
  misc_feature (944)..(944): n is a, c, g, or t
  misc_feature (947)..(947): n is a, c, g, or t
  misc_feature (956)..(956): n is a, c, g, or t
  misc_feature (963)..(963): n is a, c, g, or t
  misc_feature (998)..(999): n is a, c, g, or t
  misc_feature (1001)..(1001): n is a, c, g, or t
  misc_feature (1003)..(1003): n is a, c, g, or t
  misc_feature (1009)..(1009): n is a, c, g, or t
  misc_feature (1014)..(1014): n is a, c, g, or t
  misc_feature (1020)..(1020): n is a, c, g, or t
  misc_feature (1026)..(1027): n is a, c, g, or t
  misc_feature (1029)..(1029): n is a, c, g, or t
  misc_feature (1033)..(1033): n is a, c, g, or t
  misc_feature (1036)..(1036): n is a, c, g, or t
  misc_feature (1040)..(1041): n is a, c, g, or t
  misc_feature (1043)..(1043): n is a, c, g, or t
  misc_feature (1050)..(1051): n is a, c, g, or t
  misc_feature (1054)..(1054): n is a, c, g, or t
  misc_feature (1062)..(1063): n is a, c, g, or t
  misc_feature (1067)..(1067): n is a, c, g, or t
  misc_feature (1069)..(1070): n is a, c, g, or t
  misc_feature (1086)..(1087): n is a, c, g, or t
  misc_feature (1091)..(1092): n is a, c, g, or t
  misc_feature (1101)..(1104): n is a, c, g, or t
  misc_feature (1108)..(1108): n is a, c, g, or t
  misc_feature (1111)..(1111): n is a, c, g, or t
  misc_feature (1113)..(1113): n is a, c, g, or t
  misc_feature (1117)..(1117): n is a, c, g, or t
  misc_feature (1120)..(1120): n is a, c, g, or t
  misc_feature (1122)..(1122): n is a, c, g, or t
  misc_feature (1124)..(1124): n is a, c, g, or t
  misc_feature (1128)..(1128): n is a, c, g, or t
  misc_feature (1131)..(1131): n is a, c, g, or t
  misc_feature (1133)..(1133): n is a, c, g, or t
  misc_feature (1135)..(1138): n is a, c, g, or t
  misc_feature (1141)..(1141): n is a, c, g, or t
  misc_feature (1143)..(1143): n is a, c, g, or t
  misc_feature (1145)..(1145): n is a, c, g, or t
  misc_feature (1148)..(1148): n is a, c, g, or t
  misc_feature (1150)..(1150): n is a, c, g, or t
  misc_feature (1155)..(1157): n is a, c, g, or t
  misc_feature (1165)..(1166): n is a, c, g, or t
  misc_feature (1169)..(1170): n is a, c, g, or t
  misc_feature (1172)..(1173): n is a, c, g, or t
  misc_feature (1178)..(1185): n is a, c, g, or t
  misc_feature (1188)..(1190): n is a, c, g, or t
  misc_feature (1193)..(1199): n is a, c, g, or t
  misc_feature (1205)..(1206): n is a, c, g, or t
  misc_feature (1208)..(1209): n is a, c, g, or t
  misc_feature (1213)..(1223): n is a, c, g, or t
  misc_feature (1226)..(1230): n is a, c, g, or t
  misc_feature (1232)..(1237): n is a, c, g, or t
  misc_feature (1239)..(1240): n is a, c, g, or t
  misc_feature (1242)..(1249): n is a, c, g, or t
  misc_feature (1253)..(1256): n is a, c, g, or t
  misc_feature (1263)..(1268): n is a, c, g, or t
  misc_feature (1273)..(1275): n is a, c, g, or t
  misc_feature (1280)..(1283): n is a, c, g, or t
  misc_feature (1285)..(1285): n is a, c, g, or t
  misc_feature (1287)..(1382): n is a, c, g, or t
tagagaaattactatgagaggatcgcatcaccatcaccatcacggatcctatttaggtgacactatagaatcgtcgacccacgcgtccggatcccgccggaagcgccaggacaatggggacccgggacgacgagtacgactacctattcaaagtggtgctcatcggggactcaggcgtgggcaagagcaacctgctgtcgcgcttcacccgcaacgagttcaacctggagagcaagagcaccatcggcgtggagttcgccacccgcagcatccaggtggacggcaagaccatcaaggcgcagatctgggacaccgctggccaggagcgctaccgcgccatcacctccgcgtactaccgtggtgcagtgggcgccctgctggtgtacgacatcgccaagcacctgacctatgagaacgtggagcgctggctgaaggagctgcgggaccacgcagacagcaacatcgtcatcatgctggtgggcaacaagagtgacctgcgccacctgcgggctgtgcccactgacgaggcccgcgccttcgcagaaaagaacaacttgtccttcatcgagacctcagccttggattccactaacgtagaggaagcattcaagaacatcctcacagagatctaccgcatcgtgtcacagaaacagatcgcagaccgcgctgcccacgacgagtccccggggaacaacgtggtggacatcagcgtgccgcccaccacggacggacagaagcccaacaagctgcagtgctgccagaacctgtgacccctgcgcctccacccagcgtgcgtgcacgtcctccgcccgcccccgccacggtatcctctggcccctccctgctgtccctctgtggccggctcgttccagccctcccagtgagctctgcacggccgggccggggcccangaagnacaggancccagtgctaccccgtcctgnccngggaaaaanctaaaanccccggtttgctgcacccatgaaactcgggtcccnnancntcttgncgggntggggnaggccnnanaatnaangggnntngccaaannaanaagaaggnngaangnnccccttttcccttttnntggnnaatttaggnnnnattnctncntccnttntnangggnggncnannnnccntntnccncnaaaannngttttggnnaanncnnaaaannnnnnnnggnnnggnnnnnnnaacccnngnntttnnnnnnnnnnnttnnnnnannnnnntnnannnnnnnntttnnnnttttttnnnnnnaaacnnnccccnnnncntnnnnnnnnnnnnnnnnnnnnnnnnnnnnnnnnnnnnnnnnnnnnnnnnnnnnnnnnnnnnnnnnnnnnnnnnnnnnnnnnnnnnnnnnnnnnnnnn

SEQ ID NO: 89 - DNA, 1362 bp, Homo Sapiens
  misc_feature (827)..(827): n is a, c, g, or t
  misc_feature (883)..(883): n is a, c, g, or t
  misc_feature (900)..(900): n is a, c, g, or t
  misc_feature (926)..(926): n is a, c, g, or t
  misc_feature (954)..(954): n is a, c, g, or t
  misc_feature (970)..(970): n is a, c, g, or t
  misc_feature (977)..(977): n is a, c, g, or t
  misc_feature (1000)..(1000): n is a, c, g, or t
  misc_feature (1014)..(1014): n is a, c, g, or t
  misc_feature (1020)..(1020): n is a, c, g, or t
  misc_feature (1038)..(1038): n is a, c, g, or t
  misc_feature (1059)..(1059): n is a, c, g, or t
  misc_feature (1073)..(1074): n is a, c, g, or t
  misc_feature (1077)..(1077): n is a, c, g, or t
  misc_feature (1088)..(1088): n is a, c, g, or t
  misc_feature (1090)..(1090): n is a, c, g, or t
  misc_feature (1094)..(1094): n is a, c, g, or t
  misc_feature (1107)..(1107): n is a, c, g, or t
  misc_feature (1110)..(1110): n is a, c, g, or t
  misc_feature (1121)..(1121): n is a, c, g, or t
  misc_feature (1127)..(1127): n is a, c, g, or t
  misc_feature (1133)..(1133): n is a, c, g, or t
  misc_feature (1137)..(1137): n is a, c, g, or t
  misc_feature (1147)..(1147): n is a, c, g, or t
  misc_feature (1154)..(1154): n is a, c, g, or t
  misc_feature (1157)..(1157): n is a, c, g, or t
  misc_feature (1159)..(1159): n is a, c, g, or t
  misc_feature (1180)..(1181): n is a, c, g, or t
  misc_feature (1183)..(1183): n is a, c, g, or t
  misc_feature (1205)..(1205): n is a, c, g, or t
  misc_feature (1211)..(1211): n is a, c, g, or t
  misc_feature (1215)..(1215): n is a, c, g, or t
  misc_feature (1227)..(1227): n is a, c, g, or t
  misc_feature (1234)..(1234): n is a, c, g, or t
  misc_feature (1240)..(1240): n is a, c, g, or t
  misc_feature (1276)..(1276): n is a, c, g, or t
  misc_feature (1279)..(1279): n is a, c, g, or t
  misc_feature (1286)..(1286): n is a, c, g, or t
  misc_feature (1295)..(1295): n is a, c, g, or t
  misc_feature (1297)..(1298): n is a, c, g, or t
  misc_feature (1300)..(1300): n is a, c, g, or t
  misc_feature (1303)..(1349): n is a, c, g, or t
  misc_feature (1358)..(1359): n is a, c, g, or t
agagaaattactatgagaggatcgcatcaccatcaccatcacggatcctatttaggtgacactatagaatcgtcgacccacgcgtccgcaccagtgcgcccgccggagggtgtttatcgcggctagagagatgtcgctgctgcggtcgctgcgcgtgtttctggtcgcgcggaccgggagctacccggctgggtctcttctgcgtcagtcgccccagccaaggcacacattttatgctgggccccgtctgtctgcctcggcctccagcaaggagctcctcatgaagctgcggcggaaaacaggctactcctttgtaaattgcaagaaagctctggagacttgtggcggggacctcaaacaggcagagatctggctccacaaggaggcccagaaggagggctggagcaaagctgccaagctccaagggaggaagaccaaagaaggcctgattgggctgttgcaggaaggaaacacaactgtattagtagaggtaaactgtgagacagattttgtttctagaaatttaaaatttcaactgttggtccagcaagtagcccttggaaccatgatgcattgtcagaccctaaaggatcaaccctctgcatacagtaaaggtttcttgaattcctctgagctttctggacttccagctgggcctgacagagaaggctcactcaaggatcagttggctttagcaattggaaaactgggagaaaacatgattcttaaacgagctgcatgggtgaaggtgccatctgggttctacgttggctcttatgtccacggagcaatgcagagtccctcacttcacaagctggtgctggggnaagtatgggggccctggtcatctgtgagacgtctgaacagaaaacaaaccttgaanacgttggccgccccccnttgggcaaccatgtggtgggcatggncccccctctctgttggctccctggaacnaatgaaccctgggggnaaaggcnaaaaaataaaaatgctgtcccanccgtattttgctgnatcccnccattaccttgggggcantatgtgcaaccctcagggggngtcggtaagaaaannttnggcggtttgantntggnaaaaggtgaaaangcnccaaaaacttnaaaagnttcccnaaanttttggcccnaagaagnaananttacttttaacccccgggacnncnttacaaaaagggaattttcccnaacccncttncaaccgaaaagncgggggnaaaatnttaaaaaaattgtaaaaaaaaaaaaattttttcttnttnggccccnaaaaaaaanannanaannnnnnnnnnnnnnnnnnnnnnnnnnnnnnnnnnnnnnnnnnnnnnnaaaaaaaannggc

SEQ ID NO: 90 - DNA, 1200 bp, Homo Sapiens
  misc_feature (1)..(1): n is a, c, g, or t
  misc_feature (6)..(6): n is a, c, g, or t
  misc_feature (8)..(8): n is a, c, g, or t
  misc_feature (591)..(591): n is a, c, g, or t
  misc_feature (667)..(668): n is a, c, g, or t
  misc_feature (707)..(707): n is a, c, g, or t
  misc_feature (747)..(747): n is a, c, g, or t
  misc_feature (753)..(753): n is a, c, g, or t
  misc_feature (756)..(756): n is a, c, g, or t
  misc_feature (767)..(767): n is a, c, g, or t
  misc_feature (773)..(773): n is a, c, g, or t
  misc_feature (775)..(775): n is a, c, g, or t
  misc_feature (779)..(779): n is a, c, g, or t
  misc_feature (790)..(791): n is a, c, g, or t
  misc_feature (819)..(819): n is a, c, g, or t
  misc_feature (824)..(824): n is a, c, g, or t
  misc_feature (828)..(828): n is a, c, g, or t
  misc_feature (834)..(834): n is a, c, g, or t
  misc_feature (840)..(840): n is a, c, g, or t
  misc_feature (843)..(843): n is a, c, g, or t
  misc_feature (848)..(848): n is a, c, g, or t
  misc_feature (857)..(857): n is a, c, g, or t
  misc_feature (873)..(873): n is a, c, g, or t
  misc_feature (891)..(891): n is a, c, g, or t
  misc_feature (898)..(898): n is a, c, g, or t
  misc_feature (908)..(908): n is a, c, g, or t
  misc_feature (910)..(910): n is a, c, g, or t
  misc_feature (920)..(921): n is a, c, g, or t
  misc_feature (927)..(927): n is a, c, g, or t
  misc_feature (931)..(931): n is a, c, g, or t
  misc_feature (934)..(934): n is a, c, g, or t
  misc_feature (936)..(936): n is a, c, g, or t
  misc_feature (940)..(940): n is a, c, g, or t
  misc_feature (945)..(945): n is a, c, g, or t
  misc_feature (951)..(951): n is a, c, g, or t
  misc_feature (954)..(955): n is a, c, g, or t
  misc_feature (959)..(960): n is a, c, g, or t
  misc_feature (963)..(963): n is a, c, g, or t
  misc_feature (965)..(965): n is a, c, g, or t
  misc_feature (970)..(970): n is a, c, g, or t
  misc_feature (977)..(977): n is a, c, g, or t
  misc_feature (982)..(983): n is a, c, g, or t
  misc_feature (991)..(991): n is a, c, g, or t
  misc_feature (1001)..(1001): n is a, c, g, or t
  misc_feature (1004)..(1004): n is a, c, g, or t
  misc_feature (1008)..(1008): n is a, c, g, or t
  misc_feature (1011)..(1011): n is a, c, g, or t
  misc_feature (1016)..(1016): n is a, c, g, or t
  misc_feature (1023)..(1024): n is a, c, g, or t
  misc_feature (1026)..(1027): n is a, c, g, or t
  misc_feature (1034)..(1034): n is a, c, g, or t
  misc_feature (1040)..(1040): n is a, c, g, or t
  misc_feature (1050)..(1050): n is a, c, g, or t
  misc_feature (1052)..(1052): n is a, c, g, or t
  misc_feature (1054)..(1054): n is a, c, g, or t
  misc_feature (1058)..(1058): n is a, c, g, or t
  misc_feature (1060)..(1060): n is a, c, g, or t
  misc_feature (1066)..(1067): n is a, c, g, or t
  misc_feature (1069)..(1069): n is a, c, g, or t
  misc_feature (1078)..(1078): n is a, c, g, or t
  misc_feature (1080)..(1081): n is a, c, g, or t
  misc_feature (1089)..(1089): n is a, c, g, or t
  misc_feature (1091)..(1091): n is a, c, g, or t
  misc_feature (1101)..(1101): n is a, c, g, or t
  misc_feature (1106)..(1106): n is a, c, g, or t
  misc_feature (1108)..(1109): n is a, c, g, or t
  misc_feature (1111)..(1112): n is a, c, g, or t
  misc_feature (1115)..(1118): n is a, c, g, or t
  misc_feature (1120)..(1121): n is a, c, g, or t
  misc_feature (1124)..(1125): n is a, c, g, or t
  misc_feature (1129)..(1129): n is a, c, g, or t
  misc_feature (1137)..(1137): n is a, c, g, or t
  misc_feature (1141)..(1143): n is a, c, g, or t
  misc_feature (1150)..(1151): n is a, c, g, or t
  misc_feature (1153)..(1154): n is a, c, g, or t
  misc_feature (1157)..(1157): n is a, c, g, or t
  misc_feature (1159)..(1159): n is a, c, g, or t
  misc_feature (1163)..(1164): n is a, c, g, or t
  misc_feature (1171)..(1172): n is a, c, g, or t
  misc_feature (1175)..(1175): n is a, c, g, or t
  misc_feature (1185)..(1185): n is a, c, g, or t
  misc_feature (1191)..(1191): n is a, c, g, or t
  misc_feature (1193)..(1194): n is a, c, g, or t
  misc_feature (1198)..(1199): n is a, c, g, or t
nattananaagaaaaattaactatggagaggatcgcatcaccatcaccatcacgggatcctatttaggtgacactatagaatcgtcgacccacgcgtccgccaggcgcccgcccgccgcgcgtgattctcgcctcgccgcagcccagccctgcgcgccttgcccggcggcccccgcccggccgctccgggcccctggccccgcggagcgatgctgctgctggctgccgccttcctcgtggccttcgtgctgctgctgtacatggtgtctccgctcatcagccccaagcccctcgccctgcccggggcgcatgtggtggttacaggaggttccagtggcatcgggaagtgcattgctatcgagtgctataaacaaggagcttttataactctggttgcacgaaatgaggataagctgctgcaggcaaagaaagaaattgaaatgcactctattaatgacaaacaggtggtactttgcatatcagttgatgtatctcaagactataaccaagtagagaatgtcataaaacaagcacaggagaaactgggtccagtggacatgctggtaaattgtgcaggaatggcagtgtcangaaaatttgaaaatcttgaagttagtacctttgaaaggttaatgagcatcaattacctgggcagcgtgtaccccanncgggccgtgatcaccaccatgaaggaacgccgggtgggnagatcgtgtttgtgtcctcccaagaaggaaaattgggaantaattnagnttcaagcctantctgtntncaanttttgctatanngggattgggctaaaagcttttgccaaanggaangatnaaactnatatanatntttancatcaacanttgcattaacccaaanaaaaaaaaaaaaaccctnggttttnccaaaaaaananaaaaaaaatnnttttgnaaanttnancttntttcnaaaatnaanntttnnttngnaaaanaaaaaanggggnnccaaaaanatttttttanaantacnttnatagnaaaattnnannaattttncttttnttaaaaaaanananattnanttaganncnttaaaaatngnnaaattttntnataaattttntatantnnannggnnnnanntanngggnttaacttntgannntttttcnnannatntnattnnattatanntanaaatttaaanaaaaananntttnnc

SEQ ID NO: 91 - DNA, 1374 bp, Homo Sapiens
  misc_feature (808)..(808): n is a, c, g, or t
  misc_feature (827)..(827): n is a, c, g, or t
  misc_feature (852)..(852): n is a, c, g, or t
  misc_feature (869)..(869): n is a, c, g, or t
  misc_feature (884)..(884): n is a, c, g, or t
  misc_feature (891)..(891): n is a, c, g, or t
  misc_feature (897)..(897): n is a, c, g, or t
  misc_feature (901)..(901): n is a, c, g, or t
  misc_feature (921)..(921): n is a, c, g, or t
  misc_feature (923)..(923): n is a, c, g, or t
  misc_feature (929)..(930): n is a, c, g, or t
  misc_feature (955)..(955): n is a, c, g, or t
  misc_feature (964)..(964): n is a, c, g, or t
  misc_feature (975)..(975): n is a, c, g, or t
  misc_feature (988)..(988): n is a, c, g, or t
  misc_feature (994)..(994): n is a, c, g, or t
  misc_feature (1000)..(1001): n is a, c, g, or t
  misc_feature (1003)..(1003): n is a, c, g, or t
  misc_feature (1016)..(1016): n is a, c, g, or t
  misc_feature (1026)..(1026): n is a, c, g, or t
  misc_feature (1028)..(1028): n is a, c, g, or t
  misc_feature (1032)..(1032): n is a, c, g, or t
  misc_feature (1034)..(1034): n is a, c, g, or t
  misc_feature (1040)..(1040): n is a, c, g, or t
  misc_feature (1049)..(1049): n is a, c, g, or t
  misc_feature (1072)..(1072): n is a, c, g, or t
  misc_feature (1110)..(1110): n is a, c, g, or t
  misc_feature (1115)..(1115): n is a, c, g, or t
  misc_feature (1119)..(1119): n is a, c, g, or t
  misc_feature (1131)..(1131): n is a, c, g, or t
  misc_feature (1164)..(1164): n is a, c, g, or t
  misc_feature (1167)..(1168): n is a, c, g, or t
  misc_feature (1170)..(1171): n is a, c, g, or t
  misc_feature (1173)..(1176): n is a, c, g, or t
  misc_feature (1178)..(1182): n is a, c, g, or t
  misc_feature (1184)..(1199): n is a, c, g, or t
  misc_feature (1204)..(1204): n is a, c, g, or t
  misc_feature (1206)..(1206): n is a, c, g, or t
  misc_feature (1215)..(1215): n is a, c, g, or t
  misc_feature (1221)..(1221): n is a, c, g, or t
  misc_feature (1225)..(1225): n is a, c, g, or t
  misc_feature (1227)..(1227): n is a, c, g, or t
  misc_feature (1231)..(1233): n is a, c, g, or t
  misc_feature (1236)..(1238): n is a, c, g, or t
  misc_feature (1240)..(1240): n is a, c, g, or t
  misc_feature (1245)..(1245): n is a, c, g, or t
  misc_feature (1253)..(1253): n is a, c, g, or t
  misc_feature (1257)..(1257): n is a, c, g, or t
  misc_feature (1260)..(1260): n is a, c, g, or t
  misc_feature (1268)..(1268): n is a, c, g, or t
  misc_feature (1275)..(1275): n is a, c, g, or t
  misc_feature (1282)..(1282): n is a, c, g, or t
  misc_feature (1284)..(1284): n is a, c, g, or t
  misc_feature (1301)..(1301): n is a, c, g, or t
  misc_feature (1308)..(1308): n is a, c, g, or t
  misc_feature (1315)..(1315): n is a, c, g, or t
  misc_feature (1317)..(1317): n is a, c, g, or t
  misc_feature (1319)..(1319): n is a, c, g, or t
  misc_feature (1321)..(1321): n is a, c, g, or t
  misc_feature (1327)..(1327): n is a, c, g, or t
  misc_feature (1338)..(1338): n is a, c, g, or t
  misc_feature (1340)..(1341): n is a, c, g, or t
  misc_feature (1343)..(1345): n is a, c, g, or t
  misc_feature (1348)..(1348): n is a, c, g, or t
  misc_feature (1367)..(1367): n is a, c, g, or t
  misc_feature (1374)..(1374): n is a, c, g, or t
tagagaaattactatgagaggatcgcatcaccatcaccatcacggatcctatttaggtgacactatagaatcgtcgacccacgcgtccggcaaaaaagatctgacagagtacttgtctcgatttggggaagttgtagactgcacaattaaaacagatccagtcactgggagatcaagaggatttggatttgtgcttttcaaagatgctgctagtgttgataaggttttggaactgaaagaacacaaactggatggcaaattgatagatcccaaaagggccaaagctttaaaagggaaagaacctcccaaaaaggtttttgtgggtggattgagcccggatacttctgaagaacaaattaaagaatattttggagcctttggagagattgaaaatattgaacttcccatggatacaaaaacaaatgaaagaagaggattttgttttatcacatatactgatgaagagccagtaaaaaaattgttagaaagcagataccatcaaattggttctgggaagtgtgaaatcaaagttgcacaacccaaagaggtatataggcagcaacagcaacaacaaaaaggtggaagaggtgctgcagctggtggacgaggtggtacgaggggtcgtggccgaggtcagggccaaaactggaaccaaggatttaataactattatgatcaaggatatggaaattacaatagtgcctatggtggtgatcaaaactatagtggctatggcggatatgattatactgggtataactatgggaactatggatatggacagggatatgcagactacagtggccancagagcacttatggcaagncatctcgagggggtggcaatcaccnaaaacaattaccagccntactaaaggaaaacnttggaanaaaacngggnggagatgttaaagtaacccntncttgcnngacgaccttgaaaaattggccctcnggtgaatcnaagaggaatanttttgtaaaaaanctttcntagggnncnaaaccccctttgnggcccactgntnaaancngcccantaagtttcnttggttttaccttggcccttgcnaacccggggtaagacccaaggggaattggttaaacccnttttnttgnaccattcccggnaaacccccaaaaaagccttcccttttgggaaanaannannannnnannnnnannnnnnnnnnnnnnnnggggncnccccccccnatgggncccnanaccnnnatnnncnacctnggccccgntgtnaanccccaaangccccanccccccngntttttcaaacccggtcnccggggnttttttngnanancccccntggggaatttngnncnnngcncatgggaaaaaccccgttnccccctn

SEQ ID NO: 92 - DNA, 1435 bp, Homo Sapiens
  misc_feature (1)..(1): n is a, c, g, or t
  misc_feature (3)..(3): n is a, c, g, or t
  misc_feature (762)..(762): n is a, c, g, or t
  misc_feature (811)..(811): n is a, c, g, or t
  misc_feature (897)..(897): n is a, c, g, or t
  misc_feature (908)..(908): n is a, c, g, or t
  misc_feature (957)..(957): n is a, c, g, or t
  misc_feature (973)..(973): n is a, c, g, or t
  misc_feature (976)..(976): n is a, c, g, or t
  misc_feature (980)..(980): n is a, c, g, or t
  misc_feature (998)..(999): n is a, c, g, or t
  misc_feature (1002)..(1002): n is a, c, g, or t
  misc_feature (1007)..(1007): n is a, c, g, or t
  misc_feature (1013)..(1013): n is a, c, g, or t
  misc_feature (1017)..(1017): n is a, c, g, or t
  misc_feature (1031)..(1031): n is a, c, g, or t
  misc_feature (1036)..(1036): n is a, c, g, or t
  misc_feature (1044)..(1045): n is a, c, g, or t
  misc_feature (1052)..(1053): n is a, c, g, or t
  misc_feature (1059)..(1059): n is a, c, g, or t
  misc_feature (1067)..(1067): n is a, c, g, or t
  misc_feature (1070)..(1070): n is a, c, g, or t
  misc_feature (1072)..(1072): n is a, c, g, or t
  misc_feature (1075)..(1075): n is a, c, g, or t
  misc_feature (1085)..(1085): n is a, c, g, or t
  misc_feature (1093)..(1093): n is a, c, g, or t
  misc_feature (1111)..(1111): n is a, c, g, or t
  misc_feature (1122)..(1123): n is a, c, g, or t
  misc_feature (1134)..(1134): n is a, c, g, or t
  misc_feature (1140)..(1140): n is a, c, g, or t
  misc_feature (1148)..(1148): n is a, c, g, or t
  misc_feature (1150)..(1150): n is a, c, g, or t
  misc_feature (1157)..(1158): n is a, c, g, or t
  misc_feature (1162)..(1162): n is a, c, g, or t
  misc_feature (1164)..(1165): n is a, c, g, or t
  misc_feature (1169)..(1169): n is a, c, g, or t
  misc_feature (1187)..(1187): n is a, c, g, or t
  misc_feature (1192)..(1192): n is a, c, g, or t
  misc_feature (1197)..(1197): n is a, c, g, or t
  misc_feature (1207)..(1207): n is a, c, g, or t
  misc_feature (1222)..(1222): n is a, c, g, or t
  misc_feature (1229)..(1229): n is a, c, g, or t
  misc_feature (1237)..(1237): n is a, c, g, or t
  misc_feature (1249)..(1249): n is a, c, g, or t
  misc_feature (1255)..(1255): n is a, c, g, or t
  misc_feature (1260)..(1260): n is a, c, g, or t
  misc_feature (1266)..(1266): n is a, c, g, or t
  misc_feature (1268)..(1268): n is a, c, g, or t
  misc_feature (1276)..(1276): n is a, c, g, or t
  misc_feature (1278)..(1278): n is a, c, g, or t
  misc_feature (1288)..(1288): n is a, c, g, or t
  misc_feature (1290)..(1290): n is a, c, g, or t
  misc_feature (1292)..(1292): n is a, c, g, or t
  misc_feature (1294)..(1294): n is a, c, g, or t
  misc_feature (1297)..(1297): n is a, c, g, or t
  misc_feature (1304)..(1304): n is a, c, g, or t
  misc_feature (1312)..(1312): n is a, c, g, or t
  misc_feature (1316)..(1316): n is a, c, g, or t
  misc_feature (1321)..(1321): n is a, c, g, or t
  misc_feature (1323)..(1323): n is a, c, g, or t
  misc_feature (1336)..(1336): n is a, c, g, or t
  misc_feature (1343)..(1343): n is a, c, g, or t
  misc_feature (1352)..(1352): n is a, c, g, or t
  misc_feature (1354)..(1354): n is a, c, g, or t
  misc_feature (1357)..(1357): n is a, c, g, or t
  misc_feature (1362)..(1362): n is a, c, g, or t
  misc_feature (1365)..(1365): n is a, c, g, or t
  misc_feature (1368)..(1369): n is a, c, g, or t
  misc_feature (1374)..(1374): n is a, c, g, or t
  misc_feature (1384)..(1384): n is a, c, g, or t
  misc_feature (1386)..(1386): n is a, c, g, or t
  misc_feature (1389)..(1390): n is a, c, g, or t
  misc_feature (1394)..(1394): n is a, c, g, or t
  misc_feature (1400)..(1400): n is a, c, g, or t
  misc_feature (1403)..(1403): n is a, c, g, or t
  misc_feature (1412)..(1412): n is a, c, g, or t
ntntagagaaattactatgagaggatcgcatcaccatcaccatcacggatcctatttaggtgacactatagaatcgtcgacccacgcgtccgcctgcctactgcagcgtaggcctcgcctcaacggcaggagagcaggcggctgcggttgctgcagccttcagtctccacccggactacgccatgttggggtttgtgggtcgggtggccgctgctccggcctccggggccttgcggagactcaccccttcagcgtcgctgcccccagctcagctcttactgcgggccgctccgacggcggtccatcctgtcagggactatgcggcgcaaacatctccttcgccaaaagcaggcgccgccaccgggcgcatcgtggcggtcattggcgcagtggtggacgtccagtttgatgagggactaccaccaattctaaatgccctggaagtgcaaggcagggagaccagactggttttggaggtggcccagcatttgggtgagagcacagtaaggactattgctatggatggtacagaaggcttggttagaggccagaaagtactggattctggtgcaccaatcaaaattcctgttggtcctgagactttgggcagaatcatgaatgtcattggagaacctattgatgaaagaggtcccatcaaaaccaaacaatttgctcccattcatgctgaggctccaaagttcatggaaatgagtgttgagcaggaaattctggtgactggtatcaaggttgtcgatctgctanctccctatgccaagggtggcaaaattggtcttttttggtggtgctgganttggcaagactgtactgatcatggagttaatcaacaatgtcgcccaaagcccatggtggttactctgtgtttgctggtggttggtnaaaaggacccntgaaaggcaatgaattaataccatgaaaatgatttgaatctggtgttanccaacttaaaagaatnccncctnctaaagtaaccgcttggnntantggtncaaatnaatnaacccaccctggtnccccntgccccgnntaacctnncaactnggcctgantgngnctnaataccttcnaaaaaacnaagaaagtcaaaaaaggnactgccatttnnttgaaaaaatnctttcncttccccncnatgggtnnaaananntctnccattattgggcccaaanccctntgccntggggactanaacctccccggcccncgaaatngggtcctnttcggaaaaaanttcctncccanaaagtntnttcccccntnaaagccaacntntncnccntaaaaantatataanaccnccccnanaaaactttccctnttaacancccaaaatncncgnacctnttnaanngggcnaatcctgtgnanccnnaaancccccntanaaaagacanaagttgcagaataaaattccccg

SEQ ID NO: 93 - DNA, 1374 bp, Homo Sapiens
  misc_feature (1)..(1): n is a, c, g, or t
  misc_feature (810)..(810): n is a, c, g, or t
  misc_feature (843)..(843): n is a, c, g, or t
  misc_feature (865)..(865): n is a, c, g, or t
  misc_feature (868)..(868): n is a, c, g, or t
  misc_feature (873)..(873): n is a, c, g, or t
  misc_feature (891)..(891): n is a, c, g, or t
  misc_feature (915)..(915): n is a, c, g, or t
  misc_feature (926)..(926): n is a, c, g, or t
  misc_feature (932)..(932): n is a, c, g, or t
  misc_feature (934)..(935): n is a, c, g, or t
  misc_feature (941)..(941): n is a, c, g, or t
  misc_feature (945)..(945): n is a, c, g, or t
  misc_feature (947)..(947): n is a, c, g, or t
  misc_feature (956)..(956): n is a, c, g, or t
  misc_feature (960)..(960): n is a, c, g, or t
  misc_feature (966)..(966): n is a, c, g, or t
  misc_feature (970)..(970): n is a, c, g, or t
  misc_feature (979)..(979): n is a, c, g, or t
  misc_feature (986)..(986): n is a, c, g, or t
  misc_feature (993)..(993): n is a, c, g, or t
  misc_feature (1006)..(1006): n is a, c, g, or t
  misc_feature (1008)..(1008): n is a, c, g, or t
  misc_feature (1015)..(1015): n is a, c, g, or t
  misc_feature (1019)..(1020): n is a, c, g, or t
  misc_feature (1023)..(1023): n is a, c, g, or t
  misc_feature (1049)..(1049): n is a, c, g, or t
  misc_feature (1054)..(1055): n is a, c, g, or t
  misc_feature (1068)..(1068): n is a, c, g, or t
  misc_feature (1084)..(1086): n is a, c, g, or t
  misc_feature (1114)..(1115): n is a, c, g, or t
  misc_feature (1123)..(1124): n is a, c, g, or t
  misc_feature (1138)..(1138): n is a, c, g, or t
  misc_feature (1146)..(1146): n is a, c, g, or t
  misc_feature (1153)..(1153): n is a, c, g, or t
  misc_feature (1155)..(1155): n is a, c, g, or t
  misc_feature (1163)..(1164): n is a, c, g, or t
  misc_feature (1187)..(1188): n is a, c, g, or t
  misc_feature (1196)..(1196): n is a, c, g, or t
  misc_feature (1207)..(1207): n is a, c, g, or t
  misc_feature (1216)..(1216): n is a, c, g, or t
  misc_feature (1229)..(1229): n is a, c, g, or t
  misc_feature (1243)..(1244): n is a, c, g, or t
  misc_feature (1253)..(1253): n is a, c, g, or t
  misc_feature (1256)..(1256): n is a, c, g, or t
  misc_feature (1259)..(1259): n is a, c, g, or t
  misc_feature (1263)..(1263): n is a, c, g, or t
  misc_feature (1266)..(1266): n is a, c, g, or t
  misc_feature (1269)..(1269): n is a, c, g, or t
  misc_feature (1275)..(1276): n is a, c, g, or t
  misc_feature (1281)..(1281): n is a, c, g, or t
  misc_feature (1286)..(1289): n is a, c, g, or t
  misc_feature (1302)..(1302): n is a, c, g, or t
  misc_feature (1311)..(1311): n is a, c, g, or t
  misc_feature (1313)..(1313): n is a, c, g, or t
  misc_feature (1316)..(1320): n is a, c, g, or t
  misc_feature (1328)..(1328): n is a, c, g, or t
  misc_feature (1340)..(1340): n is a, c, g, or t
  misc_feature (1348)..(1348): n is a, c, g, or t
  misc_feature (1351)..(1353): n is a, c, g, or t
  misc_feature (1356)..(1356): n is a, c, g, or t
  misc_feature (1358)..(1358): n is a, c, g, or t
  misc_feature (1360)..(1360): n is a, c, g, or t
naattagagaaattactatgagaggatcgcatcaccatcaccatcacggatcctatttaggtgacactatagaatcgtcgacccacgcgtccggctctggtgaacctccaaaatcaggggatcgcagcggctacagcagccccggctccccaggcactcccggcagccgctcccgcaccccgtcccttccaaccccacccacccgggagcccaagaaggtggcagtggtccgtactccacccaagtcgccgtcttccgccaagagccgcctgcagacagcccccgtgcccatgccagacctgaagaatgtcaagtccaagatcggctccactgagaacctgaagcaccagccgggaggcgggaaggtgcaaatagtctacaaaccagttgacctgagcaaggtgacctccaagtgtggctcattaggcaacatccatcataaaccaggaggtggccaggtggaagtaaaatctgagaagcttgacttcaaggacagagtccagtcgaagattgggtccctggacaatatcacccacgtccctggcggaggaaataaaaagattgaaacccacaagctgaccttccgcgagaacgccaaagccaagacagaccacggggcggagatcgtgtacaagtcgccagtggtgtctggggacacgtctccacggcatctcagcaatgtctcctccaccggcagcatcgacatggtagactcgcccccagctcgccacgctagctgacgaggtgtctgcctccctggccaagcagggtttgtgatcaggcccctgggggcggtcaataattgtgganaggaaaaaatgaaaaagtgtggaaaaaaaaaanaataatggaccggggcccccgnccntttgnccccaggttgctcctcgnaattcggttaaattggttaaaccncttaaacctgntttttntnnctcggntttngnctcgggaanttcnaaatcngtgngtggggaanaaaaaanaaatttntttttttccaaantngaagggngggnntantaataaaaaattttttaaaaaaaaanttttnnaaaaaattggccnattccaaaattttccnnngggaaatccctttttaaatttttttttnntccccccnncggtaaaaaaaggnaaaaaaanaaaagtntntaaaattnntttttgggggaattttaaggggnnggggggtnccaaacccccntggggcctnttggggggggttncaaaaagggggggnnaaaaaaaanatnttnaaanttnggntttttnnggganccccnnnnaaaaaatttcccntttttaaantnaannnnntttggggnggggggaacccngggaaaanaannnggntntnaaagaaaaaaaaaa

SEQ ID NO: 94 - DNA, 1118 bp, Homo Sapiens
  misc_feature (701)..(701): n is a, c, g, or t
  misc_feature (754)..(754): n is a, c, g, or t
  misc_feature (773)..(773): n is a, c, g, or t
  misc_feature (775)..(775): n is a, c, g, or t
  misc_feature (786)..(786): n is a, c, g, or t
  misc_feature (792)..(792): n is a, c, g, or t
  misc_feature (796)..(797): n is a, c, g, or t
  misc_feature (799)..(799): n is a, c, g, or t
  misc_feature (803)..(803): n is a, c, g, or t
  misc_feature (809)..(809): n is a, c, g, or t
  misc_feature (814)..(814): n is a, c, g, or t
  misc_feature (819)..(819): n is a, c, g, or t
  misc_feature (821)..(821): n is a, c, g, or t
  misc_feature (824)..(825): n is a, c, g, or t
  misc_feature (828)..(828): n is a, c, g, or t
  misc_feature (831)..(831): n is a, c, g, or t
  misc_feature (833)..(834): n is a, c, g, or t
  misc_feature (839)..(840): n is a, c, g, or t
  misc_feature (842)..(842): n is a, c, g, or t
  misc_feature (846)..(846): n is a, c, g, or t
  misc_feature (848)..(848): n is a, c, g, or t
  misc_feature (855)..(855): n is a, c, g, or t
  misc_feature (859)..(859): n is a, c, g, or t
  misc_feature (862)..(862): n is a, c, g, or t
  misc_feature (869)..(870): n is a, c, g, or t
  misc_feature (878)..(879): n is a, c, g, or t
  misc_feature (883)..(884): n is a, c, g, or t
  misc_feature (888)..(888): n is a, c, g, or t
  misc_feature (890)..(890): n is a, c, g, or t
  misc_feature (892)..(892): n is a, c, g, or t
  misc_feature (894)..(894): n is a, c, g, or t
  misc_feature (903)..(903): n is a, c, g, or t
  misc_feature (906)..(906): n is a, c, g, or t
  misc_feature (908)..(909): n is a, c, g, or t
  misc_feature (915)..(916): n is a, c, g, or t
  misc_feature (918)..(920): n is a, c, g, or t
  misc_feature (923)..(923): n is a, c, g, or t
  misc_feature (926)..(927): n is a, c, g, or t
  misc_feature (931)..(931): n is a, c, g, or t
  misc_feature (933)..(933): n is a, c, g, or t
  misc_feature (937)..(937): n is a, c, g, or t
  misc_feature (940)..(940): n is a, c, g, or t
  misc_feature (942)..(942): n is a, c, g, or t
  misc_feature (945)..(947): n is a, c, g, or t
  misc_feature (949)..(951): n is a, c, g, or t
  misc_feature (953)..(954): n is a, c, g, or t
  misc_feature (956)..(960): n is a, c, g, or t
  misc_feature (962)..(964): n is a, c, g, or t
  misc_feature (973)..(976): n is a, c, g, or t
  misc_feature (978)..(978): n is a, c, g, or t
  misc_feature (981)..(983): n is a, c, g, or t
  misc_feature (985)..(991): n is a, c, g, or t
  misc_feature (995)..(997): n is a, c, g, or t
  misc_feature (999)..(999): n is a, c, g, or t
  misc_feature (1005)..(1008): n is a, c, g, or t
  misc_feature (1011)..(1013): n is a, c, g, or t
  misc_feature (1015)..(1017): n is a, c, g, or t
  misc_feature (1020)..(1021): n is a, c, g, or t
  misc_feature (1023)..(1023): n is a, c, g, or t
  misc_feature (1025)..(1026): n is a, c, g, or t
  misc_feature (1029)..(1029): n is a, c, g, or t
  misc_feature (1031)..(1031): n is a, c, g, or t
  misc_feature (1039)..(1048): n is a, c, g, or t
  misc_feature (1050)..(1058): n is a, c, g, or t
  misc_feature (1062)..(1062): n is a, c, g, or t
  misc_feature (1064)..(1068): n is a, c, g, or t
  misc_feature (1070)..(1075): n is a, c, g, or t
  misc_feature (1077)..(1079): n is a, c, g, or t
  misc_feature (1082)..(1082): n is a, c, g, or t
  misc_feature (1085)..(1086): n is a, c, g, or t
  misc_feature (1090)..(1095): n is a, c, g, or t
  misc_feature (1100)..(1106): n is a, c, g, or t
  misc_feature (1108)..(1111): n is a, c, g, or t
  misc_feature (1113)..(1118): n is a, c, g, or t
tagagaaattactatgagaggatcgcatcaccatcaccatcacggatcctatttaggtgacactatagaatcgtcgacccacgcgtccgggcgagccttccgccgcagctccgggctgagccagcatcgccgcacgcacagcggcgagaagccgtaccgctgccccgactgcgggaagtccttcagccacggtgccaccctggctcagcaccgtggcatccacactggggcgcggccgtaccagtgcgcggcctgcggcaaggccttcggctggcgctccacgctgctgaaacatcgcagcagccacagcggggagaagccgcaccactgcccggtgtgtggcaaggccttcgggcacggctcgctcctggcacagcacctgcgcacgcacggcggcccgcggccccacaagtgcccggtgtgcgccaagggcttcggccagggctctgcgctgctcaaacacctgcgcacgcacacgggcgagcggccctacccgtgtccgcagtgcggcaaggccttcgggcagagctcggcgctgctgcagcaccagcgcacacacacggccgagcgcccctaccgctgcccccactgcggcaaagccttcgggcagagctccaacttgcaacaccacctgcgcatccacacgggcgagcggccctacgcctgcccgcactgctccaaggccttcggccagagctcancgctgctccagcacctgcacgtgcattcgggcgagcgtccctatcgctgtcanctctgcgggaaggccttcngncaggcctccancctcancaannanaaangggtgnatganggtgnanccnntgntgnanntgccnngnccgntncctatantgantcntattaannttaattanntgannttgnantncntgttgatanatnannaatganntnnnaantcnnttgnantttnttnanaannntnnntnncnnnnngnnntttttattnnnnanaannnannnnnnnttgnnnanattttnnnnaannnannnaanntnanntgnanaaaaaaannnnnnnnnntnnnnnnnnntaanannnnnannnnnntnnnaanaanntttnnnnnnttttnnnnnnntnnnnannnnnn

SEQ ID NO: 95 - DNA, 1480 bp, Homo Sapiens
  misc_feature (125)..(125): n is a, c, g, or t
  misc_feature (155)..(155): n is a, c, g, or t
  misc_feature (162)..(162): n is a, c, g, or t
  misc_feature (183)..(183): n is a, c, g, or t
  misc_feature (192)..(192): n is a, c, g, or t
  misc_feature (208)..(208): n is a, c, g, or t
  misc_feature (231)..(231): n is a, c, g, or t
  misc_feature (258)..(258): n is a, c, g, or t
  misc_feature (267)..(267): n is a, c, g, or t
  misc_feature (292)..(292): n is a, c, g, or t
  misc_feature (315)..(315): n is a, c, g, or t
  misc_feature (352)..(352): n is a, c, g, or t
  misc_feature (403)..(403): n is a, c, g, or t
  misc_feature (405)..(405): n is a, c, g, or t
  misc_feature (424)..(424): n is a, c, g, or t
  misc_feature (430)..(430): n is a, c, g, or t
  misc_feature (436)..(436): n is a, c, g, or t
  misc_feature (462)..(462): n is a, c, g, or t
  misc_feature (503)..(503): n is a, c, g, or t
  misc_feature (511)..(511): n is a, c, g, or t
  misc_feature (546)..(546): n is a, c, g, or t
  misc_feature (560)..(560): n is a, c, g, or t
  misc_feature (583)..(583): n is a, c, g, or t
  misc_feature (589)..(589): n is a, c, g, or t
  misc_feature (595)..(595): n is a, c, g, or t
  misc_feature (602)..(602): n is a, c, g, or t
  misc_feature (608)..(608): n is a, c, g, or t
  misc_feature (622)..(622): n is a, c, g, or t
  misc_feature (638)..(638): n is a, c, g, or t
  misc_feature (642)..(642): n is a, c, g, or t
  misc_feature (644)..(644): n is a, c, g, or t
  misc_feature (652)..(653): n is a, c, g, or t
  misc_feature (661)..(661): n is a, c, g, or t
  misc_feature (677)..(677): n is a, c, g, or t
  misc_feature (681)..(681): n is a, c, g, or t
  misc_feature (683)..(683): n is a, c, g, or t
  misc_feature (685)..(685): n is a, c, g, or t
  misc_feature (687)..(687): n is a, c, g, or t
  misc_feature (695)..(695): n is a, c, g, or t
  misc_feature (700)..(701): n is a, c, g, or t
  misc_feature (704)..(705): n is a, c, g, or t
  misc_feature (709)..(709): n is a, c, g, or t
  misc_feature (712)..(712): n is a, c, g, or t
  misc_feature (716)..(716): n is a, c, g, or t
  misc_feature (721)..(721): n is a, c, g, or t
  misc_feature (723)..(723): n is a, c, g, or t
  misc_feature (728)..(728): n is a, c, g, or t
  misc_feature (735)..(735): n is a, c, g, or t
  misc_feature (745)..(745): n is a, c, g, or t
  misc_feature (756)..(756): n is a, c, g, or t
  misc_feature (771)..(771): n is a, c, g, or t
  misc_feature (795)..(795): n is a, c, g, or t
  misc_feature (797)..(797): n is a, c, g, or t
  misc_feature (801)..(802): n is a, c, g, or t
  misc_feature (805)..(805): n is a, c, g, or t
  misc_feature (808)..(808): n is a, c, g, or t
  misc_feature (820)..(820): n is a, c, g, or t
  misc_feature (831)..(831): n is a, c, g, or t
  misc_feature (834)..(834): n is a, c, g, or t
  misc_feature (843)..(845): n is a, c, g, or t
  misc_feature (847)..(847): n is a, c, g, or t
  misc_feature (853)..(854): n is a, c, g, or t
  misc_feature (856)..(857): n is a, c, g, or t
  misc_feature (870)..(870): n is a, c, g, or t
  misc_feature (872)..(873): n is a, c, g, or t
  misc_feature (886)..(887): n is a, c, g, or t
  misc_feature (889)..(889): n is a, c, g, or t
  misc_feature (891)..(891): n is a, c, g, or t
  misc_feature (894)..(894): n is a, c, g, or t
  misc_feature (903)..(903): n is a, c, g, or t
  misc_feature (915)..(915): n is a, c, g, or t
  misc_feature (919)..(919): n is a, c, g, or t
  misc_feature (922)..(923): n is a, c, g, or t
  misc_feature (930)..(930): n is a, c, g, or t
  misc_feature (932)..(932): n is a, c, g, or t
  misc_feature (936)..(936): n is a, c, g, or t
  misc_feature (940)..(940): n is a, c, g, or t
  misc_feature (943)..(944): n is a, c, g, or t
  misc_feature (954)..(954): n is a, c, g, or t
  misc_feature (961)..(961): n is a, c, g, or t
  misc_feature (964)..(964): n is a, c, g, or t
  misc_feature (971)..(971): n is a, c, g, or t
  misc_feature (976)..(977): n is a, c, g, or t
  misc_feature (980)..(981): n is a, c, g, or t
  misc_feature (986)..(986): n is a, c, g, or t
  misc_feature (988)..(988): n is a, c, g, or t
  misc_feature (990)..(992): n is a, c, g, or t
  misc_feature (996)..(997): n is a, c, g, or t
  misc_feature (999)..(999): n is a, c, g, or t
  misc_feature (1004)..(1006): n is a, c, g, or t
  misc_feature (1008)..(1008): n is a, c, g, or t
  misc_feature (1011)..(1011): n is a, c, g, or t
  misc_feature (1015)..(1015): n is a, c, g, or t
  misc_feature (1024)..(1024): n is a, c, g, or t
  misc_feature (1031)..(1032): n is a, c, g, or t
  misc_feature (1037)..(1038): n is a, c, g, or t
  misc_feature (1041)..(1042): n is a, c, g, or t
  misc_feature (1044)..(1045): n is a, c, g, or t
  misc_feature (1048)..(1048): n is a, c, g, or t
  misc_feature (1050)..(1050): n is a, c, g, or t
  misc_feature (1054)..(1055): n is a, c, g, or t
  misc_feature (1058)..(1058): n is a, c, g, or t
  misc_feature (1060)..(1060): n is a, c, g, or t
  misc_feature (1065)..(1065): n is a, c, g, or t
  misc_feature (1075)..(1075): n is a, c, g, or t
  misc_feature (1077)..(1077): n is a, c, g, or t
  misc_feature (1080)..(1080): n is a, c, g, or t
  misc_feature (1095)..(1095): n is a, c, g, or t
  misc_feature (1100)..(1101): n is a, c, g, or t
  misc_feature (1106)..(1106): n is a, c, g, or t
  misc_feature (1119)..(1119): n is a, c, g, or t
  misc_feature (1124)..(1125): n is a, c, g, or t
  misc_feature (1129)..(1130): n is a, c, g, or t
  misc_feature (1133)..(1133): n is a, c, g, or t
  misc_feature (1139)..(1139): n is a, c, g, or t
  misc_feature (1146)..(1146): n is a, c, g, or t
  misc_feature (1149)..(1150): n is a, c, g, or t
  misc_feature (1152)..(1152): n is a, c, g, or t
  misc_feature (1154)..(1155): n is a, c, g, or t
  misc_feature (1158)..(1160): n is a, c, g, or t
  misc_feature (1174)..(1175): n is a, c, g, or t
  misc_feature (1178)..(1178): n is a, c, g, or t
  misc_feature (1183)..(1183): n is a, c, g, or t
  misc_feature (1193)..(1193): n is a, c, g, or t
  misc_feature (1199)..(1199): n is a, c, g, or t
  misc_feature (1209)..(1210): n is a, c, g, or t
  misc_feature (1212)..(1213): n is a, c, g, or t
  misc_feature (1216)..(1216): n is a, c, g, or t
  misc_feature (1226)..(1226): n is a, c, g, or t
  misc_feature (1229)..(1229): n is a, c, g, or t
  misc_feature (1238)..(1238): n is a, c, g, or t
  misc_feature (1240)..(1240): n is a, c, g, or t
  misc_feature (1243)..(1243): n is a, c, g, or t
  misc_feature (1247)..(1248): n is a, c, g, or t
  misc_feature (1255)..(1255): n is a, c, g, or t
  misc_feature (1267)..(1267): n is a, c, g, or t
  misc_feature (1274)..(1275): n is a, c, g, or t
  misc_feature (1278)..(1278): n is a, c, g, or t
  misc_feature (1284)..(1284): n is a, c, g, or t
  misc_feature (1289)..(1290): n is a, c, g, or t
  misc_feature (1296)..(1296): n is a, c, g, or t
  misc_feature (1304)..(1304): n is a, c, g, or t
  misc_feature (1327)..(1327): n is a, c, g, or t
  misc_feature (1333)..(1333): n is a, c, g, or t
  misc_feature (1341)..(1342): n is a, c, g, or t
  misc_feature (1345)..(1346): n is a, c, g, or t
  misc_feature (1348)..(1348): n is a, c, g, or t
  misc_feature (1358)..(1358): n is a, c, g, or t
  misc_feature (1371)..(1374): n is a, c, g, or t
  misc_feature (1376)..(1376): n is a, c, g, or t
  misc_feature (1383)..(1384): n is a, c, g, or t
  misc_feature (1386)..(1386): n is a, c, g, or t
  misc_feature (1389)..(1389): n is a, c, g, or t
  misc_feature (1393)..(1393): n is a, c, g, or t
  misc_feature (1395)..(1395): n is a, c, g, or t
  misc_feature (1397)..(1397): n is a, c, g, or t
  misc_feature (1400)..(1400): n is a, c, g, or t
  misc_feature (1414)..(1414): n is a, c, g, or t
  misc_feature (1419)..(1419): n is a, c, g, or t
  misc_feature (1425)..(1425): n is a, c, g, or t
  misc_feature (1435)..(1435): n is a, c, g, or t
  misc_feature (1440)..(1440): n is a, c, g, or t
  misc_feature (1446)..(1447): n is a, c, g, or t
  misc_feature (1450)..(1450): n is a, c, g, or t
  misc_feature (1455)..(1456): n is a, c, g, or t
  misc_feature (1461)..(1461): n is a, c, g, or t
  misc_feature (1469)..(1470): n is a, c, g, or t
  misc_feature (1475)..(1475): n is a, c, g, or t
  misc_feature (1478)..(1478): n is a, c, g, or t
ttagagagattactatgagaggatcgcatccccctcaccatcacggatcctatttaggtgacactatagaatcgtcgacccacgcggtccggcgccccctacgggctacatgtccgggtaccccncgatgtacccggcgcctcagtaccaagggnacttccngctcttccgcgggctccaggnacccgcgcncggtcccgccacgtcnccctccttcctgagttgtttggnacccgggacggtgggcactggactcgnggggactgnagaggatccaggtgtgatagccganaccgcgccatccaagcgaggccnacattcgtgggcgcgcaagaggcaggcagcgcacacntgcgcgcacccgggttgcggcaagagctacaccaagatctcccacctgaangngcatctgcgcacgcacacngggganaagccntacgcctgcacgtgggaaggctgcgnctggagattcgcgcgctcggacgagctgacccgccactacnggaaacanacggggcagcgccccttccgctgccagctctgccnacgtgctttttcangctctgaccacctggccttgcanatgaancgcccnatttganccctgncctggcacttgaantctcctagtgactgtngatngnacaagaanncctgtatngtggtctcttcacacngaangncncntgaaacantgctnnagnngttntanccanaaaangnaaccntctcctngggactcatngttcccaaaanatccaaccccaaaanatcaaacaaggtaccccttagaananaccnnggnggnaaccttcttatngaaaaattcanaanaaacctttnnncnacaagnnannctaaataaatatntnncaaactgattttnnananccnattgaaaancaaccccaaaanaaangtnntcaatgnancatnaaancanntccctaaaangcccttnaanacccaanaaaanngannggaantnannntttnncncaaannntnggntttnaaaaaatangctcccnnaaatnnacnntnnttncngtcnnaananaaacnatcaaagggntntgntattaaaaaaaaaanccccnnccacnaaaaataaataanaaaannctannggnggcccnaaccaanaannantnncannnaaaaatttattaanntgnctctntataaaaatnataatnaacctcctanncnntcnaattttttcnaanccacggatntnccngggnntttttangtgtaaaaaacntctacannttncacatntttannattatnaatatctnattgataaaaatcgatttatccncttctnataatcanntannanaaaaaatttnacattatctcacnnnntnacacaannancantatnancnaanattctatcatcaangatanaaaatncattttaganatatntatttnntcntatannatatntattcaannataanaantg

SEQ ID NO: 96 - DNA, 1200 bp, Homo Sapiens
  misc_feature (2)..(2): n is a, c, g, or t
  misc_feature (6)..(6): n is a, c, g, or t
  misc_feature (479)..(479): n is a, c, g, or t
  misc_feature (944)..(944): n is a, c, g, or t
  misc_feature (985)..(985): n is a, c, g, or t
  misc_feature (992)..(992): n is a, c, g, or t
  misc_feature (1015)..(1015): n is a, c, g, or t
  misc_feature (1051)..(1051): n is a, c, g, or t
  misc_feature (1054)..(1054): n is a, c, g, or t
  misc_feature (1056)..(1056): n is a, c, g, or t
  misc_feature (1066)..(1066): n is a, c, g, or t
  misc_feature (1074)..(1074): n is a, c, g, or t
  misc_feature (1094)..(1094): n is a, c, g, or t
  misc_feature (1100)..(1100): n is a, c, g, or t
  misc_feature (1107)..(1107): n is a, c, g, or t
  misc_feature (1110)..(1110): n is a, c, g, or t
  misc_feature (1116)..(1116): n is a, c, g, or t
  misc_feature (1121)..(1121): n is a, c, g, or t
  misc_feature (1128)..(1128): n is a, c, g, or t
  misc_feature (1132)..(1132): n is a, c, g, or t
  misc_feature (1145)..(1145): n is a, c, g, or t
  misc_feature (1150)..(1150): n is a, c, g, or t
  misc_feature (1153)..(1153): n is a, c, g, or t
  misc_feature (1169)..(1169): n is a, c, g, or t
  misc_feature (1172)..(1172): n is a, c, g, or t
  misc_feature (1182)..(1182): n is a, c, g, or t
  misc_feature (1186)..(1186): n is a, c, g, or t
  misc_feature (1191)..(1191): n is a, c, g, or t
  misc_feature (1197)..(1197): n is a, c, g, or t
  misc_feature (1200)..(1200): n is a, c, g, or t
anaatngagaaattactatgagaggatcgcatcaccatcaccatcacggatcctatttaggtgacactatagaatcgtcgacccacgcgtccgcggacgcgtgggtggcggctgggctgcggaaacgcggccggtccggttccgcggcccaggcagagggactctgcaagcaatggctgcagcgcgcctggcaagagcggcgcctgctgctgcgggagccgcgctacacgctgctggtggccgcctgcctctgcctggcggaggtgggcatcaccttctgggtcattcacagggtggcatacacagagattgactggaaggcctacatggccgaggtagaaggcgtcatcaatggtacctatgactatacccaactgcagggtgacaccggaccacttgtgtacccagctggtttcgtgtacatctttatggggttgtactatgccaccagccgaggcactgacatccgcatggcccanaacatctttgctgtgctctacctggctaccttgctgcttgtcttcttgatctatcaccagacctgcaaggtacctcccttcgtctttttcttcatgtgctgcgcctcttaccgtgtccactccatctttgtgctgcggctcttcaatgacccagtggccatggtgctgctcttcctcagtatcaacctcctgctggcccagcgctggggctggggttgctgctttttcagcctggcagtctctgtgaagatgaatgtgctgctcttcgcccctgggttactgtttcttctcctcacacagtttggcttccgtggggccctccccaagctgggaatctgtgctggccttcaggtggtgctggggctgcccttcctgctggagaaccccagcggctacctgtcccgctcctttgaccttggccgccagtttctgttccactggacagtgaactggcgctttcctccnaaaggcgctctttctgcatcgagccttccacctggccctgntgactgnccacctcaccctgctcctgctgntttgccctctgcaggtggcacaggaaaggggaaaanttntngtccctgctnaaggaatncctccaaaaggaaggttccnccccanccccttnaancccaanccatnttccttnaaantttggggaaaggnaaatnttngccctcctctaagggnctnaaaaaaatcntggncaagnaatccnttn

SEQ ID NO: 97 - DNA, 1526 bp, Homo Sapiens
  misc_feature (102)..(102): n is a, c, g, or t
  misc_feature (118)..(118): n is a, c, g, or t
  misc_feature (120)..(120): n is a, c, g, or t
  misc_feature (122)..(122): n is a, c, g, or t
  misc_feature (129)..(129): n is a, c, g, or t
  misc_feature (139)..(139): n is a, c, g, or t
  misc_feature (171)..(171): n is a, c, g, or t
  misc_feature (177)..(177): n is a, c, g, or t
  misc_feature (210)..(210): n is a, c, g, or t
  misc_feature (213)..(213): n is a, c, g, or t
  misc_feature (217)..(217): n is a, c, g, or t
  misc_feature (219)..(221): n is a, c, g, or t
  misc_feature (228)..(228): n is a, c, g, or t
  misc_feature (231)..(231): n is a, c, g, or t
  misc_feature (236)..(236): n is a, c, g, or t
  misc_feature (238)..(238): n is a, c, g, or t
  misc_feature (255)..(255): n is a, c, g, or t
  misc_feature (261)..(261): n is a, c, g, or t
  misc_feature (263)..(263): n is a, c, g, or t
  misc_feature (273)..(273): n is a, c, g, or t
  misc_feature (284)..(284): n is a, c, g, or t
  misc_feature (291)..(292): n is a, c, g, or t
  misc_feature (306)..(306): n is a, c, g, or t
  misc_feature (323)..(323): n is a, c, g, or t
  misc_feature (353)..(353): n is a, c, g, or t
  misc_feature (356)..(356): n is a, c, g, or t
  misc_feature (361)..(361): n is a, c, g, or t
  misc_feature (369)..(369): n is a, c, g, or t
  misc_feature (384)..(384): n is a, c, g, or t
  misc_feature (387)..(388): n is a, c, g, or t
  misc_feature (401)..(401): n is a, c, g, or t
  misc_feature (404)..(404): n is a, c, g, or t
  misc_feature (419)..(419): n is a, c, g, or t
  misc_feature (425)..(425): n is a, c, g, or t
  misc_feature (438)..(438): n is a, c, g, or t
  misc_feature (446)..(446): n is a, c, g, or t
  misc_feature (449)..(449): n is a, c, g, or t
  misc_feature (459)..(459): n is a, c, g, or t
  misc_feature (463)..(463): n is a, c, g, or t
  misc_feature (465)..(465): n is a, c, g, or t
  misc_feature (467)..(467): n is a, c, g, or t
  misc_feature (507)..(507): n is a, c, g, or t
  misc_feature (531)..(531): n is a, c, g, or t
  misc_feature (534)..(534): n is a, c, g, or t
  misc_feature (536)..(536): n is a, c, g, or t
  misc_feature (554)..(554): n is a, c, g, or t
  misc_feature (557)..(557): n is a, c, g, or t
  misc_feature (564)..(564): n is a, c, g, or t
  misc_feature (566)..(566): n is a, c, g, or t
  misc_feature (573)..(574): n is a, c, g, or t
  misc_feature (576)..(577): n is a, c, g, or t
  misc_feature (582)..(582): n is a, c, g, or t
  misc_feature (603)..(603): n is a, c, g, or t
  misc_feature (608)..(610): n is a, c, g, or t
  misc_feature (621)..(621): n is a, c, g, or t
  misc_feature (627)..(627): n is a, c, g, or t
  misc_feature (631)..(631): n is a, c, g, or t
  misc_feature (636)..(637): n is a, c, g, or t
  misc_feature (640)..(640): n is a, c, g, or t
  misc_feature (670)..(670): n is a, c, g, or t
  misc_feature (683)..(683): n is a, c, g, or t
  misc_feature (686)..(686): n is a, c, g, or t
  misc_feature (693)..(693): n is a, c, g, or t
  misc_feature (696)..(696): n is a, c, g, or t
  misc_feature (699)..(699): n is a, c, g, or t
  misc_feature (704)..(704): n is a, c, g, or t
  misc_feature (709)..(709): n is a, c, g, or t
  misc_feature (723)..(723): n is a, c, g, or t
  misc_feature (726)..(726): n is a, c, g, or t
  misc_feature (739)..(739): n is a, c, g, or t
  misc_feature (746)..(746): n is a, c, g, or t
  misc_feature (749)..(749): n is a, c, g, or t
  misc_feature (755)..(755): n is a, c, g, or t
  misc_feature (765)..(765): n is a, c, g, or t
  misc_feature (782)..(782): n is a, c, g, or t
  misc_feature (785)..(785): n is a, c, g, or t
  misc_feature (789)..(789): n is a, c, g, or t
  misc_feature (792)..(792): n is a, c, g, or t
  misc_feature (802)..(803): n is a, c, g, or t
  misc_feature (806)..(806): n is a, c, g, or t
  misc_feature (814)..(814): n is a, c, g, or t
  misc_feature (818)..(818): n is a, c, g, or t
  misc_feature (820)..(820): n is a, c, g, or t
  misc_feature (826)..(826): n is a, c, g, or t
  misc_feature (830)..(830): n is a, c, g, or t
  misc_feature (832)..(832): n is a, c, g, or t
  misc_feature (834)..(834): n is a, c, g, or t
  misc_feature (838)..(838): n is a, c, g, or t
  misc_feature (840)..(840): n is a, c, g, or t
  misc_feature (844)..(845): n is a, c, g, or t
  misc_feature (848)..(848): n is a, c, g, or t
  misc_feature (852)..(852): n is a, c, g, or t
  misc_feature (856)..(857): n is a, c, g, or t
  misc_feature (862)..(862): n is a, c, g, or t
  misc_feature (866)..(867): n is a, c, g, or t
  misc_feature (870)..(870): n is a, c, g, or t
  misc_feature (873)..(873): n is a, c, g, or t
  misc_feature (875)..(875): n is a, c, g, or t
  misc_feature (877)..(877): n is a, c, g, or t
  misc_feature (881)..(881): n is a, c, g, or t
  misc_feature (885)..(886): n is a, c, g, or t
  misc_feature (889)..(889): n is a, c, g, or t
  misc_feature (893)..(894): n is a, c, g, or t
  misc_feature (896)..(896): n is a, c, g, or t
  misc_feature (898)..(898): n is a, c, g, or t
  misc_feature (908)..(909): n is a, c, g, or t
  misc_feature (915)..(915): n is a, c, g, or t
  misc_feature (917)..(917): n is a, c, g, or t
  misc_feature (924)..(925): n is a, c, g, or t
  misc_feature (930)..(931): n is a, c, g, or t
  misc_feature (933)..(933): n is a, c, g, or t
  misc_feature (943)..(946): n is a, c, g, or t
  misc_feature (950)..(950): n is a, c, g, or t
  misc_feature (953)..(953): n is a, c, g, or t
  misc_feature (956)..(956): n is a, c, g, or t
  misc_feature (958)..(958): n is a, c, g, or t
  misc_feature (963)..(963): n is a, c, g, or t
  misc_feature (968)..(968): n is a, c, g, or t
  misc_feature (974)..(975): n is a, c, g, or t
  misc_feature (977)..(977): n is a, c, g, or t
  misc_feature (983)..(983): n is a, c, g, or t
  misc_feature (987)..(987): n is a, c, g, or t
  misc_feature (990)..(990): n is a, c, g, or t
  misc_feature (1001)..(1001): n is a, c, g, or t
  misc_feature (1004)..(1004): n is a, c, g, or t
  misc_feature (1006)..(1007): n is a, c, g, or t
  misc_feature (1010)..(1010): n is a, c, g, or t
  misc_feature (1016)..(1016): n is a, c, g, or t
  misc_feature (1018)..(1019): n is a, c, g, or t
  misc_feature (1022)..(1022): n is a, c, g, or t
  misc_feature (1029)..(1029): n is a, c, g, or t
  misc_feature (1035)..(1035): n is a, c, g, or t
  misc_feature (1043)..(1043): n is a, c, g, or t
  misc_feature (1048)..(1048): n is a, c, g, or t
  misc_feature (1057)..(1057): n is a, c, g, or t
  misc_feature (1060)..(1061): n is a, c, g, or t
  misc_feature (1067)..(1067): n is a, c, g, or t
  misc_feature (1070)..(1071): n is a, c, g, or t
  misc_feature (1074)..(1076): n is a, c, g, or t
  misc_feature (1082)..(1082): n is a, c, g, or t
  misc_feature (1084)..(1084): n is a, c, g, or t
  misc_feature (1088)..(1088): n is a, c, g, or t
  misc_feature (1091)..(1091): n is a, c, g, or t
  misc_feature (1095)..(1095): n is a, c, g, or t
  misc_feature (1098)..(1098): n is a, c, g, or t
  misc_feature (1101)..(1102): n is a, c, g, or t
  misc_feature (1105)..(1106): n is a, c, g, or t
  misc_feature (1115)..(1115): n is a, c, g, or t
  misc_feature (1119)..(1119): n is a, c, g, or t
  misc_feature (1134)..(1137): n is a, c, g, or t
  misc_feature (1141)..(1141): n is a, c, g, or t
  misc_feature (1146)..(1148): n is a, c, g, or t
  misc_feature (1163)..(1163): n is a, c, g, or t
  misc_feature (1171)..(1172): n is a, c, g, or t
  misc_feature (1177)..(1179): n is a, c, g, or t
  misc_feature (1182)..(1182): n is a, c, g, or t
  misc_feature (1184)..(1187): n is a, c, g, or t
  misc_feature (1190)..(1194): n is a, c, g, or t
  misc_feature (1198)..(1199): n is a, c, g, or t
  misc_feature (1201)..(1201): n is a, c, g, or t
  misc_feature (1215)..(1216): n is a, c, g, or t
  misc_feature (1218)..(1218): n is a, c, g, or t
  misc_feature (1222)..(1222): n is a, c, g, or t
  misc_feature (1225)..(1226): n is a, c, g, or t
  misc_feature (1230)..(1230): n is a, c, g, or t
  misc_feature (1233)..(1233): n is a, c, g, or t
  misc_feature (1236)..(1236): n is a, c, g, or t
  misc_feature (1238)..(1238): n is a, c, g, or t
  misc_feature (1243)..(1243): n is a, c, g, or t
  misc_feature (1246)..(1246): n is a, c, g, or t
  misc_feature (1251)..(1251): n is a, c, g, or t
  misc_feature (1253)..(1253): n is a, c, g, or t
  misc_feature (1255)..(1255): n is a, c, g, or t
  misc_feature (1257)..(1259): n is a, c, g, or t
  misc_feature (1263)..(1263): n is a, c, g, or t
  misc_feature (1266)..(1266): n is a, c, g, or t
  misc_feature (1272)..(1272): n is a, c, g, or t
  misc_feature (1275)..(1276): n is a, c, g, or t
  misc_feature (1278)..(1278): n is a, c, g, or t
  misc_feature (1287)..(1287): n is a, c, g, or t
  misc_feature (1295)..(1298): n is a, c, g, or t
  misc_feature (1301)..(1302): n is a, c, g, or t
  misc_feature (1305)..(1305): n is a, c, g, or t
  misc_feature (1316)..(1316): n is a, c, g, or t
  misc_feature (1318)..(1319): n is a, c, g, or t
  misc_feature (1323)..(1323): n is a, c, g, or t
  misc_feature (1327)..(1327): n is a, c, g, or t
  misc_feature (1333)..(1334): n is a, c, g, or t
  misc_feature (1348)..(1348): n is a, c, g, or t
  misc_feature (1351)..(1351): n is a, c, g, or t
  misc_feature (1353)..(1354): n is a, c, g, or t
  misc_feature (1359)..(1359): n is a, c, g, or t
  misc_feature (1361)..(1362): n is a, c, g, or t
  misc_feature (1372)..(1372): n is a, c, g, or t
  misc_feature (1378)..(1379): n is a, c, g, or t
  misc_feature (1383)..(1383): n is a, c, g, or t
  misc_feature (1396)..(1396): n is a, c, g, or t
  misc_feature (1399)..(1399): n is a, c, g, or t
  misc_feature (1402)..(1402): n is a, c, g, or t
  misc_feature (1410)..(1411): n is a, c, g, or t
  misc_feature (1414)..(1414): n is a, c, g, or t
  misc_feature (1416)..(1417): n is a, c, g, or t
  misc_feature (1419)..(1419): n is a, c, g, or t
  misc_feature (1436)..(1436): n is a, c, g, or t
  misc_feature (1443)..(1443): n is a, c, g, or t
  misc_feature (1445)..(1446): n is a, c, g, or t
  misc_feature (1448)..(1448): n is a, c, g, or t
  misc_feature (1450)..(1450): n is a, c, g, or t
  misc_feature (1465)..(1465): n is a, c, g, or t
  misc_feature (1477)..(1477): n is a, c, g, or t
  misc_feature (1481)..(1481): n is a, c, g, or t
  misc_feature (1485)..(1485): n is a, c, g, or t
  misc_feature (1487)..(1487): n is a, c, g, or t
  misc_feature (1493)..(1493): n is a, c, g, or t
  misc_feature (1503)..(1504): n is a, c, g, or t
  misc_feature (1506)..(1506): n is a, c, g, or t
  misc_feature (1510)..(1510): n is a, c, g, or t
  misc_feature (1512)..(1512): n is a, c, g, or t
  misc_feature (1516)..(1516): n is a, c, g, or t
  misc_feature (1519)..(1521): n is a, c, g, or t
  misc_feature (1524)..(1524): n is a, c, g, or t
aatagagaaattactatgagaggatcgcatcaccatcaccatcacggatcctatttaggtgacactatagaatcgtcgacccacgcgtccgaatccgcaggntggaggctcccagggnangnaaacgcntgagccctgnccatgccccacgccgcagcatgaccctcctgntgctgncccttctgctggcctctctgtgtcgcgtcctgntcntgtncnnnacccaanaancacangncatggattgaggcatantaccantngcatcggtcntggagaatganaacacgnncctactgaatccancactctttgccttgaanaaggatgccccgctgcgctatgcaggtganatntgcgncttccggntccatgggtctgggntgnnctttgaggctganatncttgacaaggcgacnggagangggctgatccggnccaagganccngtgaactgcnaagncnanaaggaacacaccttcaccatccaggcctatgactgtggcnagggccccgacggggtacaacacnaanangtcccacaaggccactgngcnatgtgcngntcaacgnntnnaaacnagtttgccccatgtgtttgtngaacnnntgtatcgagcngctgtnacgnatgannaanctgtactatcgacatcctgcggatggaatncattgacggttantgntccctcncanaancgccnagatntgctactaagaaantcncacatcccaatanccctttnctnattganaaacgacggnaacgtttgataaacacntantaanccngcagttacgnntgntgaaaaantttntnttaaantttncngntgancncttnnttnactngtgnnctaanaaannccnggngntnccanagannacntganntngnagaattcaanntgaaantncacaatnntaaanncnagccttaaannnngttnganaananaaggnttccncaatanntnacctangtgnctngagagctttcnaantnngtncccttnannccnatcatgnaaaaantttttatnaaccntcttttggnaannatttangtnnacnnnaaagtntnatancancatnttnttnnaannaggcgtttngcanccataataaattttnnnnaaanaagcnnntccttaaaattttanatttttcnncatcnnnggnannnnaannnnnttcnncnttccttgtcccaanngncatnctnncagnatnagntntcttnganttttntngntnnnaaancanatggtnttnntnttttcttgncgccaatnnnnggnnatntctcccttcgnanncccnatgntcacanntgtataattacacngancnnactcngnnatagatcttnctatanngtcngtccacgaaaaantgntgntatatctnnatngnngnatagagacagaaaaaanctctttnanntncngagcacaaagaaacnatcgcctcaccnaaantatnanaacaancaccgattanngngctntntctntgnnngtncc

SEQ ID NO: 98 - DNA, 1200 bp, Homo Sapiens
  misc_feature (1)..(1): n is a, c, g, or t
  misc_feature (3)..(3): n is a, c, g, or t
  misc_feature (203)..(203): n is a, c, g, or t
  misc_feature (767)..(767): n is a, c, g, or t
  misc_feature (791)..(791): n is a, c, g, or t
  misc_feature (798)..(798): n is a, c, g, or t
  misc_feature (809)..(809): n is a, c, g, or t
  misc_feature (812)..(812): n is a, c, g, or t
  misc_feature (815)..(815): n is a, c, g, or t
  misc_feature (831)..(831): n is a, c, g, or t
  misc_feature (836)..(836): n is a, c, g, or t
  misc_feature (858)..(858): n is a, c, g, or t
  misc_feature (880)..(880): n is a, c, g, or t
  misc_feature (902)..(902): n is a, c, g, or t
  misc_feature (912)..(912): n is a, c, g, or t
  misc_feature (916)..(916): n is a, c, g, or t
  misc_feature (929)..(929): n is a, c, g, or t
  misc_feature (935)..(935): n is a, c, g, or t
  misc_feature (938)..(938): n is a, c, g, or t
  misc_feature (942)..(942): n is a, c, g, or t
  misc_feature (970)..(970): n is a, c, g, or t
  misc_feature (978)..(978): n is a, c, g, or t
  misc_feature (986)..(986): n is a, c, g, or t
  misc_feature (1001)..(1002): n is a, c, g, or t
  misc_feature (1006)..(1006): n is a, c, g, or t
  misc_feature (1012)..(1012): n is a, c, g, or t
  misc_feature (1025)..(1025): n is a, c, g, or t
  misc_feature (1034)..(1035): n is a, c, g, or t
  misc_feature (1043)..(1043): n is a, c, g, or t
  misc_feature (1045)..(1045): n is a, c, g, or t
  misc_feature (1053)..(1054): n is a, c, g, or t
  misc_feature (1058)..(1058): n is a, c, g, or t
  misc_feature (1065)..(1065): n is a, c, g, or t
  misc_feature (1075)..(1077): n is a, c, g, or t
  misc_feature (1079)..(1080): n is a, c, g, or t
  misc_feature (1095)..(1095): n is a, c, g, or t
  misc_feature (1099)..(1099): n is a, c, g, or t
  misc_feature (1101)..(1101): n is a, c, g, or t
  misc_feature (1112)..(1112): n is a, c, g, or t
  misc_feature (1117)..(1117): n is a, c, g, or t
  misc_feature (1128)..(1128): n is a, c, g, or t
  misc_feature (1130)..(1132): n is a, c, g, or t
  misc_feature (1134)..(1134): n is a, c, g, or t
  misc_feature (1136)..(1137): n is a, c, g, or t
  misc_feature (1141)..(1141): n is a, c, g, or t
  misc_feature (1143)..(1143): n is a, c, g, or t
  misc_feature (1145)..(1145): n is a, c, g, or t
  misc_feature (1147)..(1147): n is a, c, g, or t
  misc_feature (1153)..(1153): n is a, c, g, or t
  misc_feature (1156)..(1158): n is a, c, g, or t
  misc_feature (1160)..(1162): n is a, c, g, or t
  misc_feature (1164)..(1164): n is a, c, g, or t
  misc_feature (1166)..(1167): n is a, c, g, or t
  misc_feature (1170)..(1170): n is a, c, g, or t
  misc_feature (1172)..(1173): n is a, c, g, or t
  misc_feature (1176)..(1176): n is a, c, g, or t
  misc_feature (1179)..(1179): n is a, c, g, or t
  misc_feature (1183)..(1183): n is a, c, g, or t
  misc_feature (1195)..(1195): n is a, c, g, or t
nantagagaaattactatgagaggatcgcatcaccatcaccatcacggatcctatttaggtgacactatagaatcgtcgacccacgcgtccgacagagcagagcaagtcggagctgagctcacggctggacacgctgagtgcggagaaggatgctctgagtggagctgtgcggcagcgggaggcagacctgctggcggcgcanagcctggtgcgcgagacagaggcggcgctgagccgggagcagcagcgcagctcccaggagcagggcgagttgcagggccggctggcagagagggagtctcaggagcaggggctgcggcagaggctgctggacgagcagttcgcagtgttgcggggcgctgctgccgaggccgcgggcatcctgcaggatgccgtgagcaagctggacgaccccctgcacctgcgctgtaccagctccccagactacctggtgagcagggcccaggaggccttggatgccgtgagcaccctggaggagggccacgcccagtacctgacctccttggcagacgcctccgccctggtggcagctctgacccgcttctcccacctggctgcggataccatcatcaatggcggtgccacctcgcacctggctcccaccgaccctgccgaccgcctcatagacacctgcagggagtgcggggcccgggctctggagctcatggggcagctgcaggaccagcaggctctgcggcacatgcaggccagcctggtgcggacacccctgcagggcatccttcanctgggccaggaactgaaacccaanagcctanatgtgcggcanganganctgggggccgtggtcnacaangaaatggcggccacatccgcanccattgaaaatgctgtgcggangattgaggacatgatgaaccangcacgccacnccanctcgggggtgaanctggangtnaacnaaaagaatcctcaactcctgcacaaacntgatgaangctatccngctcctggtgacaanntccnctaacntgcaaaagaaatnttgaaaacnncagggggncncccccccnncagnaattttnccccaaaaannncnnttgaaccaaagcctntttngncctccaaggtntgggnttgggaacccncnnntngnngaancncntnaaaagnggnnntnnncngnnaantnnaanaantttnttttttttcccnaaaat

SEQ ID NO: 99 - DNA, 1356 bp, Homo Sapiens
  misc_feature (960)..(960): n is a, c, g, or t
  misc_feature (980)..(980): n is a, c, g, or t
  misc_feature (983)..(983): n is a, c, g, or t
  misc_feature (991)..(991): n is a, c, g, or t
  misc_feature (1029)..(1029): n is a, c, g, or t
  misc_feature (1041)..(1041): n is a, c, g, or t
  misc_feature (1062)..(1062): n is a, c, g, or t
  misc_feature (1074)..(1074): n is a, c, g, or t
  misc_feature (1076)..(1078): n is a, c, g, or t
  misc_feature (1084)..(1084): n is a, c, g, or t
  misc_feature (1090)..(1090): n is a, c, g, or t
  misc_feature (1101)..(1101): n is a, c, g, or t
  misc_feature (1107)..(1107): n is a, c, g, or t
  misc_feature (1114)..(1114): n is a, c, g, or t
  misc_feature (1142)..(1143): n is a, c, g, or t
  misc_feature (1145)..(1145): n is a, c, g, or t
  misc_feature (1149)..(1149): n is a, c, g, or t
  misc_feature (1153)..(1153): n is a, c, g, or t
  misc_feature (1156)..(1156): n is a, c, g, or t
  misc_feature (1161)..(1161): n is a, c, g, or t
  misc_feature (1178)..(1178): n is a, c, g, or t
  misc_feature (1192)..(1192): n is a, c, g, or t
  misc_feature (1200)..(1200): n is a, c, g, or t
  misc_feature (1203)..(1203): n is a, c, g, or t
  misc_feature (1210)..(1210): n is a, c, g, or t
  misc_feature (1216)..(1216): n is a, c, g, or t
  misc_feature (1222)..(1222): n is a, c, g, or t
  misc_feature (1238)..(1238): n is a, c, g, or t
  misc_feature (1260)..(1260): n is a, c, g, or t
  misc_feature (1271)..(1271): n is a, c, g, or t
  misc_feature (1278)..(1278): n is a, c, g, or t
  misc_feature (1282)..(1282): n is a, c, g, or t
  misc_feature (1285)..(1285): n is a, c, g, or t
  misc_feature (1287)..(1289): n is a, c, g, or t
  misc_feature (1291)..(1291): n is a, c, g, or t
  misc_feature (1293)..(1293): n is a, c, g, or t
  misc_feature (1295)..(1295): n is a, c, g, or t
  misc_feature (1297)..(1297): n is a, c, g, or t
  misc_feature (1305)..(1305): n is a, c, g, or t
  misc_feature (1308)..(1308): n is a, c, g, or t
  misc_feature (1311)..(1311): n is a, c, g, or t
  misc_feature (1319)..(1320): n is a, c, g, or t
  misc_feature (1323)..(1324): n is a, c, g, or t
  misc_feature (1336)..(1336): n is a, c, g, or t
  misc_feature (1338)..(1338): n is a, c, g, or t
  misc_feature (1340)..(1340): n is a, c, g, or t
  misc_feature (1348)..(1348): n is a, c, g, or t
  misc_feature (1353)..(1353): n is a, c, g, or t
caatagagagattactatgagaggatcgcatcaccatcaccatcacggatcctatttaggtgacactatagaatcgtcgacccacgcgtccgggtacctgctctgcgaactggtgtctgacgacccccgctgccgcctaagcctcgatgaccgagttctgagcagcctcgtacgggacacgatcgccagggtgcacggaactttcggcgcagccgcctgctccatcggcttcgcgggtgcaagggcgctgggggaagaggggaacccgggaggatggcgggatgtggagggggcaggcgccggaggaagaaagaaggggcacgagtggccaagcccgtgcaccgttttttgtaaggtatctctttaagcgcctgggaccccaagcgagagtccgaaattagcagagcgctaaaaggaggggcccgaaggcagtggggctttgagctagaagcctctttttacctgcttgacaggtaatttctgtaattggttgtgattgaatttgatagggtagagaattaaatgagggaagctgtgtatacttcctagtaagagctattatatgaccgattacattaacatcatatggaaaaaaattgtcaaaagtactccgggaaagcccttaaatagttggtaaagtacagaacacatgattgtcaatatatgtaaatacaggatgagctaggacagaggggcccttctttcacaccacttaaattagttcccactttaaccttgtttgagattgacttctggagagttaaatgcagatagacttaactctcctaagtcaggtgagactgagagctgactgctacaataaattacggagcccaaatgcagtaaaacagcctgtttttcaggcaagggttttgtgggggttttttcctaaaattaaaacggatcgcctcctacctgctcctatttattgaattaactagtgaattaaaaagcatttcnattctaaattcattccccanttntgaatggngtgcaacacagtggggggtttggcttttccctttaacnccctgaaaaatntaagtgcccttgcctaaaaanatactttttggnannnaaatangccctnttaccccaaanttttcnttttttncaaaaaaatctgggctttttcccaagcnngntggnaggnccncaccnaaaacgggggtcattgntgcccccgcccccnggggttcnggnaattccngccccncccccngggggggggaaataanggggcccccccccccccctaanttttttttttntaaaaangggnttntnnntntngnanggggcccnaanccnaaaaaaannatnncccccccccccnangngggaaaanggggnccc

SEQ ID NO: 100 - DNA, 1559 bp, Homo Sapiens
  misc_feature (4)..(4): n is a, c, g, or t
  misc_feature (291)..(291): n is a, c, g, or t
  misc_feature (351)..(351): n is a, c, g, or t
  misc_feature (356)..(356): n is a, c, g, or t
  misc_feature (386)..(386): n is a, c, g, or t
  misc_feature (395)..(395): n is a, c, g, or t
  misc_feature (432)..(432): n is a, c, g, or t
  misc_feature (446)..(446): n is a, c, g, or t
  misc_feature (458)..(458): n is a, c, g, or t
  misc_feature (468)..(468): n is a, c, g, or t
  misc_feature (495)..(495): n is a, c, g, or t
  misc_feature (507)..(507): n is a, c, g, or t
  misc_feature (524)..(524): n is a, c, g, or t
  misc_feature (527)..(527): n is a, c, g, or t
  misc_feature (562)..(562): n is a, c, g, or t
  misc_feature (568)..(568): n is a, c, g, or t
  misc_feature (576)..(576): n is a, c, g, or t
  misc_feature (590)..(590): n is a, c, g, or t
  misc_feature (593)..(593): n is a, c, g, or t
  misc_feature (599)..(599): n is a, c, g, or t
  misc_feature (602)..(602): n is a, c, g, or t
  misc_feature (611)..(611): n is a, c, g, or t
  misc_feature (617)..(617): n is a, c, g, or t
  misc_feature (624)..(624): n is a, c, g, or t
  misc_feature (639)..(639): n is a, c, g, or t
  misc_feature (642)..(642): n is a, c, g, or t
  misc_feature (673)..(673): n is a, c, g, or t
  misc_feature (676)..(676): n is a, c, g, or t
  misc_feature (678)..(678): n is a, c, g, or t
  misc_feature (691)..(692): n is a, c, g, or t
  misc_feature (698)..(698): n is a, c, g, or t
  misc_feature (704)..(705): n is a, c, g, or t
  misc_feature (712)..(712): n is a, c, g, or t
  misc_feature (716)..(716): n is a, c, g, or t
  misc_feature (726)..(726): n is a, c, g, or t
  misc_feature (733)..(733): n is a, c, g, or t
  misc_feature (738)..(738): n is a, c, g, or t
  misc_feature (746)..(746): n is a, c, g, or t
  misc_feature (753)..(753): n is a, c, g, or t
  misc_feature (756)..(756): n is a, c, g, or t
  misc_feature (760)..(760): n is a, c, g, or t
  misc_feature (766)..(767): n is a, c, g, or t
  misc_feature (774)..(774): n is a, c, g, or t
  misc_feature (778)..(778): n is a, c, g, or t
  misc_feature (781)..(782): n is a, c, g, or t
  misc_feature (788)..(789): n is a, c, g, or t
  misc_feature (791)..(792): n is a, c, g, or t
  misc_feature (796)..(796): n is a, c, g, or t
  misc_feature (798)..(799): n is a, c, g, or t
  misc_feature (816)..(816): n is a, c, g, or t
  misc_feature (819)..(819): n is a, c, g, or t
  misc_feature (833)..(833): n is a, c, g, or t
  misc_feature (838)..(838): n is a, c, g, or t
  misc_feature (846)..(848): n is a, c, g, or t
  misc_feature (855)..(856): n is a, c, g, or t
  misc_feature (861)..(861): n is a, c, g, or t
  misc_feature (864)..(866): n is a, c, g, or t
  misc_feature (870)..(871): n is a, c, g, or t
  misc_feature (874)..(874): n is a, c, g, or t
  misc_feature (878)..(878): n is a, c, g, or t
  misc_feature (883)..(883): n is a, c, g, or t
  misc_feature (885)..(885): n is a, c, g, or t
  misc_feature (887)..(888): n is a, c, g, or t
  misc_feature (892)..(892): n is a, c, g, or t
  misc_feature (899)..(899): n is a, c, g, or t
  misc_feature (907)..(907): n is a, c, g, or t
  misc_feature (913)..(913): n is a, c, g, or t
  misc_feature (925)..(925): n is a, c, g, or t
  misc_feature (927)..(928): n is a, c, g, or t
  misc_feature (939)..(939): n is a, c, g, or t
  misc_feature (946)..(946): n is a, c, g, or t
  misc_feature (949)..(949): n is a, c, g, or t
  misc_feature (952)..(952): n is a, c, g, or t
  misc_feature (958)..(958): n is a, c, g, or t
  misc_feature (960)..(961): n is a, c, g, or t
  misc_feature (963)..(963): n is a, c, g, or t
  misc_feature (967)..(967): n is a, c, g, or t
  misc_feature (978)..(978): n is a, c, g, or t
  misc_feature (982)..(983): n is a, c, g, or t
  misc_feature (985)..(985): n is a, c, g, or t
  misc_feature (987)..(988): n is a, c, g, or t
  misc_feature (996)..(997): n is a, c, g, or t
  misc_feature (999)..(999): n is a, c, g, or t
  misc_feature (1003)..(1003): n is a, c, g, or t
  misc_feature (1005)..(1005): n is a, c, g, or t
  misc_feature (1011)..(1011): n is a, c, g, or t
  misc_feature (1013)..(1013): n is a, c, g, or t
  misc_feature (1016)..(1016): n is a, c, g, or t
  misc_feature (1019)..(1019): n is a, c, g, or t
  misc_feature (1027)..(1027): n is a, c, g, or t
  misc_feature (1030)..(1030): n is a, c, g, or t
  misc_feature (1033)..(1033): n is a, c, g, or t
  misc_feature (1035)..(1035): n is a, c, g, or t
  misc_feature (1037)..(1037): n is a, c, g, or t
  misc_feature (1039)..(1040): n is a, c, g, or t
  misc_feature (1042)..(1042): n is a, c, g, or t
  misc_feature (1046)..(1046): n is a, c, g, or t
  misc_feature (1048)..(1048): n is a, c, g, or t
  misc_feature (1052)..(1052): n is a, c, g, or t
  misc_feature (1055)..(1055): n is a, c, g, or t
  misc_feature (1057)..(1057): n is a, c, g, or t
  misc_feature (1061)..(1062): n is a, c, g, or t
  misc_feature (1064)..(1065): n is a, c, g, or t
  misc_feature (1073)..(1073): n is a, c, g, or t
  misc_feature (1079)..(1079): n is a, c, g, or t
  misc_feature (1082)..(1082): n is a, c, g, or t
  misc_feature (1095)..(1095): n is a, c, g, or t
  misc_feature (1112)..(1112): n is a, c, g, or t
  misc_feature (1115)..(1115): n is a, c, g, or t
  misc_feature (1118)..(1119): n is a, c, g, or t
  misc_feature (1122)..(1123): n is a, c, g, or t
  misc_feature (1128)..(1128): n is a, c, g, or t
  misc_feature (1131)..(1132): n is a, c, g, or t
  misc_feature (1135)..(1135): n is a, c, g, or t
  misc_feature (1138)..(1139): n is a, c, g, or t
  misc_feature (1141)..(1141): n is a, c, g, or t
  misc_feature (1160)..(1160): n is a, c, g, or t
  misc_feature (1162)..(1162): n is a, c, g, or t
  misc_feature (1171)..(1171): n is a, c, g, or t
  misc_feature (1177)..(1177): n is a, c, g, or t
  misc_feature (1183)..(1183): n is a, c, g, or t
  misc_feature (1185)..(1185): n is a, c, g, or t
  misc_feature (1188)..(1188): n is a, c, g, or t
  misc_feature (1190)..(1190): n is a, c, g, or t
  misc_feature (1195)..(1195): n is a, c, g, or t
  misc_feature (1198)..(1199): n is a, c, g, or t
  misc_feature (1201)..(1201): n is a, c, g, or t
  misc_feature (1208)..(1208): n is a, c, g, or t
  misc_feature (1211)..(1211): n is a, c, g, or t
  misc_feature (1214)..(1215): n is a, c, g, or t
  misc_feature (1221)..(1221): n is a, c, g, or t
  misc_feature (1225)..(1225): n is a, c, g, or t
  misc_feature (1237)..(1237): n is a, c, g, or t
  misc_feature (1240)..(1240): n is a, c, g, or t
  misc_feature (1256)..(1257): n is a, c, g, or t
  misc_feature (1259)..(1259): n is a, c, g, or t
  misc_feature (1262)..(1264): n is a, c, g, or t
  misc_feature (1269)..(1270): n is a, c, g, or t
  misc_feature (1273)..(1273): n is a, c, g, or t
  misc_feature (1276)..(1277): n is a, c, g, or t
  misc_feature (1290)..(1290): n is a, c, g, or t
  misc_feature (1292)..(1292): n is a, c, g, or t
  misc_feature (1310)..(1310): n is a, c, g, or t
  misc_feature (1313)..(1315): n is a, c, g, or t
  misc_feature (1318)..(1318): n is a, c, g, or t
  misc_feature (1326)..(1326): n is a, c, g, or t
  misc_feature (1329)..(1329): n is a, c, g, or t
  misc_feature (1331)..(1331): n is a, c, g, or t
  misc_feature (1333)..(1333): n is a, c, g, or t
  misc_feature (1338)..(1338): n is a, c, g, or t
  misc_feature (1340)..(1340): n is a, c, g, or t
  misc_feature (1349)..(1351): n is a, c, g, or t
  misc_feature (1353)..(1353): n is a, c, g, or t
  misc_feature (1356)..(1356): n is a, c, g, or t
  misc_feature (1366)..(1368): n is a, c, g, or t
  misc_feature (1374)..(1374): n is a, c, g, or t
  misc_feature (1378)..(1379): n is a, c, g, or t
  misc_feature (1381)..(1381): n is a, c, g, or t
  misc_feature (1383)..(1383): n is a, c, g, or t
  misc_feature (1386)..(1386): n is a, c, g, or t
  misc_feature (1397)..(1397): n is a, c, g, or t
  misc_feature (1402)..(1402): n is a, c, g, or t
  misc_feature (1407)..(1407): n is a, c, g, or t
  misc_feature (1412)..(1413): n is a, c, g, or t
  misc_feature (1417)..(1417): n is a, c, g, or t
  misc_feature (1425)..(1425): n is a, c, g, or t
  misc_feature (1431)..(1431): n is a, c, g, or t
  misc_feature (1433)..(1433): n is a, c, g, or t
  misc_feature (1435)..(1436): n is a, c, g, or t
  misc_feature (1444)..(1447): n is a, c, g, or t
  misc_feature (1451)..(1451): n is a, c, g, or t
  misc_feature (1455)..(1455): n is a, c, g, or t
  misc_feature (1460)..(1460): n is a, c, g, or t
  misc_feature (1462)..(1463): n is a, c, g, or t
  misc_feature (1466)..(1466): n is a, c, g, or t
  misc_feature (1473)..(1473): n is a, c, g, or t
  misc_feature (1477)..(1477): n is a, c, g, or t
  misc_feature (1485)..(1485): n is a, c, g, or t
  misc_feature (1487)..(1487): n is a, c, g, or t
  misc_feature (1492)..(1492): n is a, c, g, or t
  misc_feature (1494)..(1494): n is a, c, g, or t
  misc_feature (1498)..(1498): n is a, c, g, or t
  misc_feature (1500)..(1500): n is a, c, g, or t
  misc_feature (1513)..(1513): n is a, c, g, or t
  misc_feature (1515)..(1516): n is a, c, g, or t
  misc_feature (1519)..(1519): n is a, c, g, or t
  misc_feature (1526)..(1526): n is a, c, g, or t
  misc_feature (1529)..(1529): n is a, c, g, or t
  misc_feature (1532)..(1532): n is a, c, g, or t
  misc_feature (1539)..(1539): n is a, c, g, or t
  misc_feature (1543)..(1543): n is a, c, g, or t
  misc_feature (1545)..(1545): n is a, c, g, or t
  misc_feature (1547)..(1548): n is a, c, g, or t
  misc_feature (1551)..(1551): n is a, c, g, or t
  misc_feature (1554)..(1555): n is a, c, g, or t
  misc_feature (1557)..(1557): n is a, c, g, or t
caanagagagaattactatgagaggatcgcatcaccatcaccatcacggatcctatttaggtgacactatagaatcgtcgacccacgcgtccgcccacgcgtccgcgcagccggcccgggcccccgccagcctccctcctcgcgtccctcggtgtcctccgcgggccggcgcgatgcggctgggcccgaggaccgcggcgttggggctgctgctgctgtgcgccgccgcggccggcgccggcaaggccgaggagctgcactacccgctgggcgagcgccgcagcgactacnaccgcgaggcgctgctgggcgtccaggaagatgtggatgaatatgttaaactcggccacnaagancagcaaaaaagactgcaggcgatcataaanaaaatcganttggactcaaatggctttctcactgaaagtgaactcngttcatggattcanatgtcttttaancattatgctntgcaacaagcaaaacaacagtttgttnaatatgataaanacagatgatgatactgnganttgacgatgaatataacatttcacatgtatgatcntgtgantgactttnatgataacaactgnctntggatngangcagaaaangaatcnttttaanaagcttcacttaganganaaataatcgatttgcaaaaagctaaaccaanaantncatgtcccggttnngattcnttgaannaatttanatgncttttttgancgatccntgaanacaattanaattatnttnactnaatttnnttcattncaanaannttttannannaacntnnaaaaacatggcgattgncanttggtttaaatttngcaanaatttttnnntgaattnnaaganggnnnttcnnatntcanaatgnananntccnaaaatgncttatttnttaagnaaaaaaaaattncnngaataattttnaaaaaanaanatntaaagncnntntttnaatctccaaanaaanntntnntctttggnnantcancntataantncangtncttttccnaanaantnancnncnttcntncaantcnanaaanntnnttttaatngaaacnaanaagctcccccacnaaagaaagagttctagnaantannccnngtttnttnnctntcnngntaaaaactatttatttatncntacatttcncaaaanacacantnttntntcatnaanngncttttanctntcnnaacctnttcnttataaacaaantangcccctaataaatttnnancannnttttnnttnacnnttaaacccccgcntnaattaaacaatcaacaanttnnnctnacatgaanaancnantgctncntaattgtgnnnanatntgaattatannnctttcnattnncnanaanatctacactancttantatanctccnnaaanacacgaanatactnancnntatatacnnnncgtntganaaacntnnctnctttatntatntaacaacntntctantnactnantttcacatagtancnnacncatattnatntcntagtacncatntnannatntanncntg

SEQ ID NO: 101 - DNA, 1200 bp, Homo Sapiens
  misc_feature (832)..(832): n is a, c, g, or t
  misc_feature (836)..(836): n is a, c, g, or t
  misc_feature (840)..(840): n is a, c, g, or t
  misc_feature (859)..(859): n is a, c, g, or t
  misc_feature (865)..(865): n is a, c, g, or t
  misc_feature (871)..(871): n is a, c, g, or t
  misc_feature (877)..(877): n is a, c, g, or t
  misc_feature (882)..(882): n is a, c, g, or t
  misc_feature (894)..(894): n is a, c, g, or t
  misc_feature (899)..(899): n is a, c, g, or t
  misc_feature (903)..(904): n is a, c, g, or t
  misc_feature (920)..(920): n is a, c, g, or t
  misc_feature (935)..(935): n is a, c, g, or t
  misc_feature (945)..(945): n is a, c, g, or t
  misc_feature (949)..(949): n is a, c, g, or t
  misc_feature (953)..(953): n is a, c, g, or t
  misc_feature (961)..(962): n is a, c, g, or t
  misc_feature (967)..(968): n is a, c, g, or t
  misc_feature (973)..(973): n is a, c, g, or t
  misc_feature (982)..(982): n is a, c, g, or t
  misc_feature (987)..(987): n is a, c, g, or t
  misc_feature (990)..(990): n is a, c, g, or t
  misc_feature (992)..(992): n is a, c, g, or t
  misc_feature (994)..(994): n is a, c, g, or t
  misc_feature (1000)..(1001): n is a, c, g, or t
  misc_feature (1005)..(1005): n is a, c, g, or t
  misc_feature (1021)..(1021): n is a, c, g, or t
  misc_feature (1027)..(1027): n is a, c, g, or t
  misc_feature (1029)..(1029): n is a, c, g, or t
  misc_feature (1033)..(1033): n is a, c, g, or t
  misc_feature (1035)..(1035): n is a, c, g, or t
  misc_feature (1037)..(1037): n is a, c, g, or t
  misc_feature (1040)..(1040): n is a, c, g, or t
  misc_feature (1042)..(1042): n is a, c, g, or t
  misc_feature (1046)..(1047): n is a, c, g, or t
  misc_feature (1052)..(1052): n is a, c, g, or t
  misc_feature (1054)..(1055): n is a, c, g, or t
  misc_feature (1060)..(1061): n is a, c, g, or t
  misc_feature (1063)..(1063): n is a, c, g, or t
  misc_feature (1069)..(1070): n is a, c, g, or t
  misc_feature (1076)..(1079): n is a, c, g, or t
  misc_feature (1084)..(1084): n is a, c, g, or t
  misc_feature (1087)..(1087): n is a, c, g, or t
  misc_feature (1090)..(1090): n is a, c, g, or t
  misc_feature (1094)..(1096): n is a, c, g, or t
  misc_feature (1100)..(1101): n is a, c, g, or t
  misc_feature (1105)..(1105): n is a, c, g, or t
  misc_feature (1108)..(1109): n is a, c, g, or t
  misc_feature (1111)..(1111): n is a, c, g, or t
  misc_feature (1120)..(1120): n is a, c, g, or t
  misc_feature (1123)..(1123): n is a, c, g, or t
  misc_feature (1125)..(1125): n is a, c, g, or t
  misc_feature (1127)..(1127): n is a, c, g, or t
  misc_feature (1129)..(1130): n is a, c, g, or t
  misc_feature (1135)..(1135): n is a, c, g, or t
  misc_feature (1137)..(1137): n is a, c, g, or t
  misc_feature (1139)..(1139): n is a, c, g, or t
  misc_feature (1143)..(1143): n is a, c, g, or t
  misc_feature (1145)..(1145): n is a, c, g, or t
  misc_feature (1148)..(1150): n is a, c, g, or t
  misc_feature (1152)..(1152): n is a, c, g, or t
  misc_feature (1155)..(1155): n is a, c, g, or t
  misc_feature (1157)..(1160): n is a, c, g, or t
  misc_feature (1167)..(1169): n is a, c, g, or t
  misc_feature (1171)..(1172): n is a, c, g, or t
  misc_feature (1180)..(1180): n is a, c, g, or t
  misc_feature (1186)..(1186): n is a, c, g, or t
  misc_feature (1188)..(1191): n is a, c, g, or t
  misc_feature (1193)..(1196): n is a, c, g, or t
  misc_feature (1200)..(1200): n is a, c, g, or t
tagagaaattactatgagaggatcgcatcaccatcaccatcacggatcctatttaggtgacactatagaatcgtcgacccacgcgtccgagcagtcgccctccagcaagcacagccccctgaccgccagcgcccgtggggactgtgtgccgagccacgggcaggacagtcgcaggcgcggccggcggaagcgagcatctgcggggacgcccagcttgagcgcaggcgtgtcccccaagcgccgagccctgccgtccgtcgctggccttttcacacagccttcggggtctcccctcaacctcaactccatggtcagtaacatcaaccagcccctggagattacagccatctcgtccccggagacctccctgaagagctcccctgtgccctaccaggaccacgaccagccccccgtgctcaagaaggagcggcctctgagccagaccaatggggcacactactccccactcacctcagacgaggagccaggctctgaggacgagcccagcagtgctcgaattgagagaaaaattgcaacaatctccttagaaagcaaatctcccccgaaaaccttggaaaatggtggtggcttggcgggaaggaagcccgcgcccgccggcgagccagtcaatagcagcaagtggaagtccaccttctcgcccatctccgacatcggcctggccaagtcggcggacagcccgctgcaggccagctccgccctcagccagaactccctgttcacgttccggcccgccctggaggagccctctgccgatgccaagctggccgctcaccccaggaaaggctttcccggctccctgtcgggggctganggantcancccgggcaccaaccctgcnaacggntgcacnttcggnggggnctggccgcgganctganttanncagcttcagtgatggngcttctcttccccanaagggccccnaggnggcnggcctganntcccnntgaanttccctccnaacgnggnangnagggtnngaanccaaccctttctgaanaaaagnanctgnangnctngntggnntaaangnnaaggnnanccccgnnaagaannnnggganggnggnctannntttnngggnccnngnaaaaacccntgntnangnnaggcncnangccngnacnnnangtnannnnaaaaggnnnanntttttttngggggngnnnntnnnnaaan

SEQ ID NO: 102 - DNA, 1200 bp, Homo Sapiens
  misc_feature (853)..(853): n is a, c, g, or t
  misc_feature (859)..(859): n is a, c, g, or t
  misc_feature (886)..(886): n is a, c, g, or t
  misc_feature (908)..(908): n is a, c, g, or t
  misc_feature (920)..(920): n is a, c, g, or t
  misc_feature (945)..(945): n is a, c, g, or t
  misc_feature (948)..(948): n is a, c, g, or t
  misc_feature (954)..(954): n is a, c, g, or t
  misc_feature (956)..(956): n is a, c, g, or t
  misc_feature (959)..(959): n is a, c, g, or t
  misc_feature (964)..(964): n is a, c, g, or t
  misc_feature (969)..(969): n is a, c, g, or t
  misc_feature (1001)..(1001): n is a, c, g, or t
  misc_feature (1006)..(1006): n is a, c, g, or t
  misc_feature (1015)..(1016): n is a, c, g, or t
  misc_feature (1019)..(1019): n is a, c, g, or t
  misc_feature (1023)..(1024): n is a, c, g, or t
  misc_feature (1036)..(1037): n is a, c, g, or t
  misc_feature (1041)..(1041): n is a, c, g, or t
  misc_feature (1044)..(1044): n is a, c, g, or t
  misc_feature (1062)..(1062): n is a, c, g, or t
  misc_feature (1066)..(1066): n is a, c, g, or t
  misc_feature (1077)..(1077): n is a, c, g, or t
  misc_feature (1080)..(1080): n is a, c, g, or t
  misc_feature (1087)..(1089): n is a, c, g, or t
  misc_feature (1091)..(1095): n is a, c, g, or t
  misc_feature (1103)..(1103): n is a, c, g, or t
  misc_feature (1112)..(1114): n is a, c, g, or t
  misc_feature (1122)..(1122): n is a, c, g, or t
  misc_feature (1124)..(1124): n is a, c, g, or t
  misc_feature (1128)..(1128): n is a, c, g, or t
  misc_feature (1146)..(1147): n is a, c, g, or t
  misc_feature (1154)..(1154): n is a, c, g, or t
  misc_feature (1156)..(1156): n is a, c, g, or t
  misc_feature (1169)..(1169): n is a, c, g, or t
  misc_feature (1173)..(1173): n is a, c, g, or t
  misc_feature (1177)..(1177): n is a, c, g, or t
  misc_feature (1179)..(1179): n is a, c, g, or t
  misc_feature (1184)..(1186): n is a, c, g, or t
  misc_feature (1191)..(1191): n is a, c, g, or t
  misc_feature (1193)..(1193): n is a, c, g, or t
aatagagaaattactatgagaggatcgcatcaccatcaccatcacggatcctatttaggtgacactatagaatcgtcgacccacgcgtccggcgacgccctccattcactctccgcgcccgttctccggctgtcctcccgttccgctgcccgccctgccaccatgacggaacaggccatctccttcgccaaagacttcttggccggaggcatcgccgccgccatctccaagacggccgtggctccgatcgagcgggtcaagctgctgctgcaggtccagcacgccagcaagcagatcgccgccgacaagcagtacaagggcatcgtggactgcattgtccgcatccccaaggagcagggcgtgctgtccttctggaggggcaaccttgccaacgtcattcgctacttccccactcaagccctcaacttcgccttcaaggataagtacaagcagatcttcctggggggcgtggacaagcacacgcagttctggaggtactttgcgggcaacctggcctccggcggtgcggccggcgcgacctccctctgcttcgtgtacccgctggatttcgccagaacccgcctggcagcggacgtgggaaagtcaggcacagagcgcgagttccgaggcctgggagactgcctggtgaagatcaccaagtccgacggcatccggggcctgtaccagggcttcagtgtctccgtgcagggcatcatcatctaccgggcggcctacttcggcgtgtacgatacggccaagggcatgctccccgaccccaagaacacgcacatcgtggtgagctggatgatcgcgcaaaccgtgacggccgtggccggcgtggtgtcctaccccnttcganacggtgcggcggcgcatgatgatgcantccgggcgcaaaagaaactganatcatgtacacngggcaccgtcgaatgttggaagaanatnttaaananganggggnaaggncttcttcaagggtgcgtggtccaacgtcctgnggggnatggggggnnccnttcnnggctggtcctgnnaaanaanttcaaaaaggggattaangggncgggggcttcnttnaaaaaannnannnnnggggaacnaaaaaaacnnntaaaaatntnaacngggggaaaaaaaaacttnnaaaattncnatttttttttttnccancccnanctgcnnnaaaangncgggaaa

SEQ ID NO: 103 - DNA, 1200 bp, Homo Sapiens
  misc_feature (278)..(278): n is a, c, g, or t
  misc_feature (413)..(413): n is a, c, g, or t
  misc_feature (565)..(565): n is a, c, g, or t
  misc_feature (609)..(609): n is a, c, g, or t
  misc_feature (621)..(621): n is a, c, g, or t
  misc_feature (627)..(627): n is a, c, g, or t
  misc_feature (662)..(662): n is a, c, g, or t
  misc_feature (666)..(666): n is a, c, g, or t
  misc_feature (669)..(669): n is a, c, g, or t
  misc_feature (686)..(686): n is a, c, g, or t
  misc_feature (699)..(699): n is a, c, g, or t
  misc_feature (724)..(724): n is a, c, g, or t
  misc_feature (735)..(735): n is a, c, g, or t
  misc_feature (740)..(741): n is a, c, g, or t
  misc_feature (743)..(743): n is a, c, g, or t
  misc_feature (757)..(757): n is a, c, g, or t
  misc_feature (761)..(761): n is a, c, g, or t
  misc_feature (766)..(767): n is a, c, g, or t
  misc_feature (773)..(774): n is a, c, g, or t
  misc_feature (780)..(780): n is a, c, g, or t
  misc_feature (785)..(785): n is a, c, g, or t
  misc_feature (787)..(787): n is a, c, g, or t
  misc_feature (792)..(792): n is a, c, g, or t
  misc_feature (795)..(796): n is a, c, g, or t
  misc_feature (798)..(798): n is a, c, g, or t
  misc_feature (800)..(800): n is a, c, g, or t
  misc_feature (804)..(804): n is a, c, g, or t
  misc_feature (809)..(809): n is a, c, g, or t
  misc_feature (811)..(811): n is a, c, g, or t
  misc_feature (818)..(818): n is a, c, g, or t
  misc_feature (821)..(821): n is a, c, g, or t
  misc_feature (824)..(824): n is a, c, g, or t
  misc_feature (827)..(827): n is a, c, g, or t
  misc_feature (835)..(835): n is a, c, g, or t
  misc_feature (846)..(846): n is a, c, g, or t
  misc_feature (850)..(850): n is a, c, g, or t
  misc_feature (852)..(852): n is a, c, g, or t
  misc_feature (861)..(861): n is a, c, g, or t
  misc_feature (866)..(866): n is a, c, g, or t
  misc_feature (870)..(870): n is a, c, g, or t
  misc_feature (878)..(878): n is a, c, g, or t
  misc_feature (880)..(881): n is a, c, g, or t
  misc_feature (883)..(883): n is a, c, g, or t
  misc_feature (888)..(888): n is a, c, g, or t
  misc_feature (895)..(896): n is a, c, g, or t
  misc_feature (900)..(901): n is a, c, g, or t
  misc_feature (906)..(906): n is a, c, g, or t
  misc_feature (909)..(909): n is a, c, g, or t
  misc_feature (912)..(912): n is a, c, g, or t
  misc_feature (918)..(919): n is a, c, g, or t
  misc_feature (924)..(924): n is a, c, g, or t
  misc_feature (934)..(935): n is a, c, g, or t
  misc_feature (937)..(937): n is a, c, g, or t
  misc_feature (949)..(949): n is a, c, g, or t
  misc_feature (956)..(956): n is a, c, g, or t
  misc_feature (965)..(965): n is a, c, g, or t
  misc_feature (992)..(992): n is a, c, g, or t
  misc_feature (997)..(997): n is a, c, g, or t
  misc_feature (1010)..(1011): n is a, c, g, or t
  misc_feature (1013)..(1013): n is a, c, g, or t
  misc_feature (1015)..(1015): n is a, c, g, or t
  misc_feature (1017)..(1017): n is a, c, g, or t
  misc_feature (1026)..(1026): n is a, c, g, or t
  misc_feature (1033)..(1033): n is a, c, g, or t
  misc_feature (1036)..(1036): n is a, c, g, or t
  misc_feature (1038)..(1039): n is a, c, g, or t
  misc_feature (1051)..(1051): n is a, c, g, or t
  misc_feature (1068)..(1068): n is a, c, g, or t
  misc_feature (1074)..(1074): n is a, c, g, or t
  misc_feature (1076)..(1076): n is a, c, g, or t
  misc_feature (1078)..(1078): n is a, c, g, or t
  misc_feature (1080)..(1080): n is a, c, g, or t
  misc_feature (1085)..(1085): n is a, c, g, or t
  misc_feature (1087)..(1087): n is a, c, g, or t
  misc_feature (1099)..(1100): n is a, c, g, or t
  misc_feature (1103)..(1103): n is a, c, g, or t
  misc_feature (1106)..(1106): n is a, c, g, or t
  misc_feature (1111)..(1111): n is a, c, g, or t
  misc_feature (1115)..(1116): n is a, c, g, or t
  misc_feature (1119)..(1119): n is a, c, g, or t
  misc_feature (1123)..(1123): n is a, c, g, or t
  misc_feature (1126)..(1126): n is a, c, g, or t
  misc_feature (1129)..(1129): n is a, c, g, or t
  misc_feature (1143)..(1143): n is a, c, g, or t
  misc_feature (1146)..(1146): n is a, c, g, or t
  misc_feature (1148)..(1149): n is a, c, g, or t
  misc_feature (1161)..(1161): n is a, c, g, or t
  misc_feature (1169)..(1169): n is a, c, g, or t
  misc_feature (1173)..(1173): n is a, c, g, or t
  misc_feature (1177)..(1177): n is a, c, g, or t
  misc_feature (1181)..(1182): n is a, c, g, or t
  misc_feature (1187)..(1187): n is a, c, g, or t
  misc_feature (1192)..(1192): n is a, c, g, or t
  misc_feature (1197)..(1197): n is a, c, g, or t
  misc_feature (1200)..(1200): n is a, c, g, or t
tagagagattactatgagaggatcgcatcaccatcaccatcacgggatcctatttaggtgacactatagaatcgtcgacccacgcgtccgctaaggaaaagctctggaaagggccaacggagcggatattcccggagcccctctgcgagccacgcgcccctctgggaagcccgcttccccctgcagacaggcgctgtgacacgcttgcgccccggtcgaacaggcgaagaggccgaggcccagagcggcgcagggcgagcctggaggctgcgccccanacctggaccagccacggacgccgctcccgccgctccctccgctccgctgcgctccgcacgctggcgccggctccccgaggccccgggcgccccggccgcacgcctgggtaaaaggtcccgaggagtccgcagaancgcgcccacgcccgagacggccgtttccgccggcctgggaaaggggcggagaagggggtcgcccgggccgcagcgtgccggtccccgccggccgagccgtgtttggggccagtccccgcaccccgcttcttccccacctggggagcggggcnccgcggtaggggcactggagcgcacgatgcaccccgccaacgantcctttctgcanacgggnttcctgttttcatgcaaatgcctttgttagcgcancggnaancatggggacggaactgnaactgacgcgggntgcgcgccgctttttccgccttcgnttgattcggcntcaannanttaaacgcgccggnaacnaaaanngcctgnnccgcgnaaaancnttcanganngntncganaaagngnggctccnctnggntcnccgaaaantgatgcggaangggncngggctggtngcctncaancccttttncnnanatcancaaaggnnaatnnaaccntcnaanttgttnnttaantttttttaanntncattggaaattncttaaantaaggaacncacttttagtgtcctcccatttttgtntatanttattttgttccnnancnantgttggaangcaaacnttnannaaatttttttangagtaattttccttttnccaaantnananggatntnaaacaataaatnnttntcnttttntttnnttntaanaantanaaaattattataanagngnngttttctccttnatgtgaanttanaaancttnnttatntaaanctagntcn

SEQ ID NO: 104 - DNA, 1387 bp, Homo Sapiens
  misc_feature (2)..(4): n is a, c, g, or t
  misc_feature (7)..(15): n is a, c, g, or t
  misc_feature (17)..(17): n is a, c, g, or t
  misc_feature (19)..(23): n is a, c, g, or t
  misc_feature (767)..(767): n is a, c, g, or t
  misc_feature (779)..(780): n is a, c, g, or t
  misc_feature (782)..(782): n is a, c, g, or t
  misc_feature (793)..(793): n is a, c, g, or t
  misc_feature (800)..(800): n is a, c, g, or t
  misc_feature (815)..(815): n is a, c, g, or t
  misc_feature (820)..(821): n is a, c, g, or t
  misc_feature (829)..(829): n is a, c, g, or t
  misc_feature (838)..(838): n is a, c, g, or t
  misc_feature (847)..(847): n is a, c, g, or t
  misc_feature (851)..(851): n is a, c, g, or t
  misc_feature (855)..(855): n is a, c, g, or t
  misc_feature (864)..(864): n is a, c, g, or t
  misc_feature (868)..(868): n is a, c, g, or t
  misc_feature (876)..(877): n is a, c, g, or t
  misc_feature (880)..(880): n is a, c, g, or t
  misc_feature (889)..(889): n is a, c, g, or t
  misc_feature (892)..(892): n is a, c, g, or t
  misc_feature (895)..(896): n is a, c, g, or t
  misc_feature (898)..(898): n is a, c, g, or t
  misc_feature (902)..(903): n is a, c, g, or t
  misc_feature (906)..(908): n is a, c, g, or t
  misc_feature (911)..(911): n is a, c, g, or t
  misc_feature (913)..(914): n is a, c, g, or t
  misc_feature (918)..(918): n is a, c, g, or t
  misc_feature (923)..(923): n is a, c, g, or t
  misc_feature (932)..(932): n is a, c, g, or t
  misc_feature (936)..(936): n is a, c, g, or t
  misc_feature (943)..(943): n is a, c, g, or t
  misc_feature (948)..(948): n is a, c, g, or t
  misc_feature (953)..(954): n is a, c, g, or t
  misc_feature (956)..(958): n is a, c, g, or t
  misc_feature (960)..(960): n is a, c, g, or t
  misc_feature (963)..(963): n is a, c, g, or t
  misc_feature (970)..(970): n is a, c, g, or t
  misc_feature (972)..(974): n is a, c, g, or t
  misc_feature (979)..(984): n is a, c, g, or t
  misc_feature (989)..(989): n is a, c, g, or t
  misc_feature (993)..(993): n is a, c, g, or t
  misc_feature (996)..(997): n is a, c, g, or t
  misc_feature (1000)..(1002): n is a, c, g, or t
  misc_feature (1004)..(1004): n is a, c, g, or t
  misc_feature (1007)..(1008): n is a, c, g, or t
  misc_feature (1010)..(1016): n is a, c, g, or t
  misc_feature (1019)..(1019): n is a, c, g, or t
  misc_feature (1024)..(1024): n is a, c, g, or t
  misc_feature (1028)..(1029): n is a, c, g, or t
  misc_feature (1033)..(1037): n is a, c, g, or t
  misc_feature (1042)..(1045): n is a, c, g, or t
  misc_feature (1047)..(1048): n is a, c, g, or t
  misc_feature (1050)..(1051): n is a, c, g, or t
  misc_feature (1053)..(1056): n is a, c, g, or t
  misc_feature (1061)..(1065): n is a, c, g, or t
  misc_feature (1069)..(1069): n is a, c, g, or t
  misc_feature (1071)..(1073): n is a, c, g, or t
  misc_feature (1076)..(1080): n is a, c, g, or t
  misc_feature (1082)..(1084): n is a, c, g, or t
  misc_feature (1086)..(1087): n is a, c, g, or t
  misc_feature (1089)..(1089): n is a, c, g, or t
  misc_feature (1092)..(1092): n is a, c, g, or t
  misc_feature (1095)..(1095): n is a, c, g, or t
  misc_feature (1098)..(1098): n is a, c, g, or t
  misc_feature (1101)..(1102): n is a, c, g, or t
  misc_feature (1104)..(1107): n is a, c, g, or t
  misc_feature (1109)..(1109): n is a, c, g, or t
  misc_feature (1112)..(1113): n is a, c, g, or t
  misc_feature (1115)..(1118): n is a, c, g, or t
  misc_feature (1120)..(1126): n is a, c, g, or t
  misc_feature (1128)..(1139): n is a, c, g, or t
  misc_feature (1142)..(1144): n is a, c, g, or t
  misc_feature (1146)..(1148): n is a, c, g, or t
  misc_feature (1152)..(1155): n is a, c, g, or t
  misc_feature (1158)..(1164): n is a, c, g, or t
  misc_feature (1167)..(1167): n is a, c, g, or t
  misc_feature (1169)..(1169): n is a, c, g, or t
  misc_feature (1172)..(1173): n is a, c, g, or t
  misc_feature (1175)..(1187): n is a, c, g, or t
  misc_feature (1189)..(1192): n is a, c, g, or t
  misc_feature (1194)..(1194): n is a, c, g, or t
  misc_feature (1198)..(1203): n is a, c, g, or t
  misc_feature (1205)..(1205): n is a, c, g, or t
  misc_feature (1207)..(1215): n is a, c, g, or t
  misc_feature (1217)..(1235): n is a, c, g, or t
  misc_feature (1237)..(1243): n is a, c, g, or t
  misc_feature (1246)..(1249): n is a, c, g, or t
  misc_feature (1251)..(1258): n is a, c, g, or t
  misc_feature (1260)..(1261): n is a, c, g, or t
  misc_feature (1263)..(1266): n is a, c, g, or t
  misc_feature (1269)..(1270): n is a, c, g, or t
  misc_feature (1272)..(1280): n is a, c, g, or t
  misc_feature (1284)..(1287): n is a, c, g, or t
  misc_feature (1289)..(1291): n is a, c, g, or t
  misc_feature (1293)..(1302): n is a, c, g, or t
  misc_feature (1304)..(1305): n is a, c, g, or t
  misc_feature (1307)..(1312): n is a, c, g, or t
  misc_feature (1314)..(1332): n is a, c, g, or t
  misc_feature (1334)..(1352): n is a, c, g, or t
  misc_feature (1354)..(1360): n is a, c, g, or t
  misc_feature (1362)..(1363): n is a, c, g, or t
  misc_feature (1365)..(1367): n is a, c, g, or t
  misc_feature (1369)..(1371): n is a, c, g, or t
  misc_feature (1373)..(1378): n is a, c, g, or t
  misc_feature (1380)..(1386): n is a, c, g, or t
annnaannnnnnnnncntnnnnntcccatcacggatcctatttaggtgacactatagaatcgtcgacccacgcgtccggctctcagctggctcttgtctcgcccttttgttttatttcggaggcttgcagtttagggcatcgaggagccacagccggagagaagaacacagcggtaggaatggcttgcaccaccccagtccggatcatttctggccccgcttcccggacgctctgcgccccttcgttccttgggatcaattggaaaacgaggattccagcgtgcacatttccccccggcagaagcgagatgccaactccagcatctacaaaggcaagaagtgccgcatggagtcctgcttcgatttcaccctttgcaagaaaaacggcttcaaagtctacgtatacccacagcaaaaaggggagaaaatcgccgaaagttaccaaaacattctagcggccatcgagggctccaggttctacacctcggaccccagccaggcgtgcctctttgtcctgagtctggatactttagacagagaccagttgtcacctcagtatgtgcacaatttgagatccaaagtgcagagtctccacttgtggaacaatggtaggaatcatttaatttttaatttatattccggcacttggcctgactacaccgaggacgtggggtttgacatcggccaggcgatgctggccaaagccagcatcagtactgaaaaacttccgacccaactttgatgtttctattcccctcttttctaangatcatccccannanaggaagggganagggggntttttgaagttcaanaccannccttcctntcaggaaanaacatgctnggtnttcnaggggaaanaagntacttgannggnaaaggatcnaanccnngnatgnnttnnnttncnntccnttaanggggaagangttntgctccnccccncctgnnannnanggnaaaaatngnnnaaaannnnnngattncttnctnngannnanaannannnnnnnttntaaantatnntttnnnnnaaatnnnnannanngnnnnttttnnnnngttncnnnggnnnnnannntnngnctntanaantcnngnnnntnttnngnnnncnnnnnnncnnnnnnnnnnnnaannngnnnaatnnnnttnnnnnnnatnanttnnannnnnnnnnnnnnannnnanaaannnnnnanannnnnnnnntnnnnnnnnnnnnnnnnnnnannnnnnntannnnannnnnnnngnngnnnnttnntnnnnnnnnntatnnnnannntnnnnnnnnnnanntnnnnnntnnnnnnnnnnnnnnnnnnnannnnnnnnnnnnnnnnnnntnnnnnnnanntnnntnnnannnnnnannnnnnna

SEQ ID NO: 105 - DNA, 1200 bp, Homo Sapiens
  misc_feature (922)..(922): n is a, c, g, or t
  misc_feature (936)..(936): n is a, c, g, or t
  misc_feature (938)..(938): n is a, c, g, or t
  misc_feature (956)..(956): n is a, c, g, or t
  misc_feature (986)..(986): n is a, c, g, or t
  misc_feature (1014)..(1014): n is a, c, g, or t
  misc_feature (1020)..(1020): n is a, c, g, or t
  misc_feature (1029)..(1029): n is a, c, g, or t
  misc_feature (1033)..(1033): n is a, c, g, or t
  misc_feature (1054)..(1054): n is a, c, g, or t
  misc_feature (1068)..(1068): n is a, c, g, or t
  misc_feature (1071)..(1071): n is a, c, g, or t
  misc_feature (1073)..(1073): n is a, c, g, or t
  misc_feature (1081)..(1081): n is a, c, g, or t
  misc_feature (1083)..(1083): n is a, c, g, or t
  misc_feature (1105)..(1105): n is a, c, g, or t
  misc_feature (1123)..(1123): n is a, c, g, or t
  misc_feature (1129)..(1129): n is a, c, g, or t
  misc_feature (1131)..(1131): n is a, c, g, or t
  misc_feature (1133)..(1133): n is a, c, g, or t
  misc_feature (1140)..(1141): n is a, c, g, or t
  misc_feature (1151)..(1151): n is a, c, g, or t
  misc_feature (1161)..(1161): n is a, c, g, or t
  misc_feature (1168)..(1168): n is a, c, g, or t
  misc_feature (1175)..(1175): n is a, c, g, or t
  misc_feature (1190)..(1190): n is a, c, g, or t
  misc_feature (1193)..(1193): n is a, c, g, or t
  misc_feature (1199)..(1199): n is a, c, g, or t
attagagaaattactatgagaggatcgcatcaccatcaccatcacggatcctatttaggtgacactatagaatcgtcgacccacgcgtccgctgcgagccaggattcccgatccagagacaatggccccgatgggatggagcccgaaggcgtcatcgagagtaactggaatgagattgttgacagctttgatgacatgaacctctcggagtcccttctccgtggcatctacgcctatggttttgagaagccctctgccatccagcagcgagccattctaccttgtatcaagggttatgatgtgattgctcaagcccaatctgggactgggaaaacggccacatttgccatatcaattctgcagcagattgaattagatctaaaagccacccaggccttggtcctagcacccactcgagaattggctcagcagatacagaaggtggtcatggcactaggagactacatgggcgcctcctgtcacgcctgtatcgggggcaccaacgtgcgtgctgaggtgcagaaactgcagatggaagctccccacatcatcgtgggtacccctggccgtgtgtttgatatgcttaaccggagatacctgtcccccaaatacatcaagatgtttgtactggatgaagctgacgaaatgttaagccgtggattcaaggaccagatctatgacatattccaaaagctcaacagcaacacccaggtagttttgctgtcagccacaatgccttctgatgtgcttgaggtgaccaagaagttcatgagggaccccattcggattcttgtcaagaaggaagagttgaccctggagggagtggaagctggacacactatgtgacttgtatgaaaccctgaccatcacccaggcagtcatcttcatcaacacccggaggaaggtggactggctcaccganaaaatgcatgctcnanatttcactgtatcccccntgcatggagatatggaccaaaaggaacganacgtgattatgagggagtttcgttctgnctctancaaaatttngatnacactgacctgctggccaaangcattgatgtgcancangnttctttantntcaactatgaccttcccccaangggaaaactaattccccnaaatcngncnagggganngtttggcccnaaaggggggnttttaanatggggnaaaaaaaaaaaaaanganctttcna

SEQ ID NO: 106 - DNA, 1443 bp, Homo Sapiens
  misc_feature (1)..(1): n is a, c, g, or t
  misc_feature (51)..(51): n is a, c, g, or t
  misc_feature (221)..(221): n is a, c, g, or t
  misc_feature (263)..(263): n is a, c, g, or t
  misc_feature (279)..(279): n is a, c, g, or t
  misc_feature (301)..(301): n is a, c, g, or t
  misc_feature (306)..(306): n is a, c, g, or t
  misc_feature (310)..(310): n is a, c, g, or t
  misc_feature (326)..(326): n is a, c, g, or t
  misc_feature (383)..(383): n is a, c, g, or t
  misc_feature (395)..(395): n is a, c, g, or t
  misc_feature (405)..(405): n is a, c, g, or t
  misc_feature (409)..(409): n is a, c, g, or t
  misc_feature (427)..(427): n is a, c, g, or t
  misc_feature (429)..(429): n is a, c, g, or t
  misc_feature (444)..(444): n is a, c, g, or t
  misc_feature (448)..(449): n is a, c, g, or t
  misc_feature (458)..(458): n is a, c, g, or t
  misc_feature (460)..(460): n is a, c, g, or t
  misc_feature (462)..(462): n is a, c, g, or t
  misc_feature (484)..(484): n is a, c, g, or t
  misc_feature (487)..(487): n is a, c, g, or t
  misc_feature (495)..(495): n is a, c, g, or t
  misc_feature (507)..(507): n is a, c, g, or t
  misc_feature (509)..(509): n is a, c, g, or t
  misc_feature (512)..(512): n is a, c, g, or t
  misc_feature (516)..(516): n is a, c, g, or t
  misc_feature (521)..(521): n is a, c, g, or t
  misc_feature (536)..(536): n is a, c, g, or t
  misc_feature (543)..(544): n is a, c, g, or t
  misc_feature (549)..(549): n is a, c, g, or t
  misc_feature (575)..(575): n is a, c, g, or t
  misc_feature (577)..(577): n is a, c, g, or t
  misc_feature (594)..(594): n is a, c, g, or t
  misc_feature (597)..(597): n is a, c, g, or t
  misc_feature (601)..(601): n is a, c, g, or t
  misc_feature (605)..(605): n is a, c, g, or t
  misc_feature (607)..(607): n is a, c, g, or t
  misc_feature (617)..(617): n is a, c, g, or t
  misc_feature (626)..(626): n is a, c, g, or t
  misc_feature (631)..(631): n is a, c, g, or t
  misc_feature (633)..(633): n is a, c, g, or t
  misc_feature (636)..(636): n is a, c, g, or t
  misc_feature (640)..(640): n is a, c, g, or t
  misc_feature (647)..(647): n is a, c, g, or t
  misc_feature (650)..(651): n is a, c, g, or t
  misc_feature (656)..(656): n is a, c, g, or t
  misc_feature (662)..(662): n is a, c, g, or t
  misc_feature (668)..(668): n is a, c, g, or t
  misc_feature (676)..(677): n is a, c, g, or t
  misc_feature (690)..(691): n is a, c, g, or t
  misc_feature (694)..(697): n is a, c, g, or t
  misc_feature (701)..(701): n is a, c, g, or t
  misc_feature (708)..(708): n is a, c, g, or t
  misc_feature (714)..(714): n is a, c, g, or t
  misc_feature (719)..(719): n is a, c, g, or t
  misc_feature (721)..(721): n is a, c, g, or t
  misc_feature (724)..(725): n is a, c, g, or t
  misc_feature (728)..(728): n is a, c, g, or t
  misc_feature (735)..(735): n is a, c, g, or t
  misc_feature (740)..(741): n is a, c, g, or t
  misc_feature (743)..(744): n is a, c, g, or t
  misc_feature (749)..(750): n is a, c, g, or t
  misc_feature (758)..(758): n is a, c, g, or t
  misc_feature (762)..(762): n is a, c, g, or t
  misc_feature (767)..(767): n is a, c, g, or t
  misc_feature (771)..(772): n is a, c, g, or t
  misc_feature (780)..(780): n is a, c, g, or t
  misc_feature (783)..(784): n is a, c, g, or t
  misc_feature (786)..(787): n is a, c, g, or t
  misc_feature (800)..(800): n is a, c, g, or t
  misc_feature (811)..(811): n is a, c, g, or t
  misc_feature (814)..(814): n is a, c, g, or t
  misc_feature (816)..(816): n is a, c, g, or t
  misc_feature (818)..(819): n is a, c, g, or t
  misc_feature (821)..(821): n is a, c, g, or t
  misc_feature (823)..(823): n is a, c, g, or t
  misc_feature (826)..(826): n is a, c, g, or t
  misc_feature (829)..(829): n is a, c, g, or t
  misc_feature (837)..(837): n is a, c, g, or t
  misc_feature (842)..(842): n is a, c, g, or t
  misc_feature (845)..(845): n is a, c, g, or t
  misc_feature (853)..(854): n is a, c, g, or t
  misc_feature (857)..(862): n is a, c, g, or t
  misc_feature (866)..(866): n is a, c, g, or t
  misc_feature (869)..(870): n is a, c, g, or t
  misc_feature (873)..(873): n is a, c, g, or t
  misc_feature (884)..(884): n is a, c, g, or t
  misc_feature (887)..(887): n is a, c, g, or t
  misc_feature (903)..(903): n is a, c, g, or t
  misc_feature (905)..(908): n is a, c, g, or t
  misc_feature (912)..(917): n is a, c, g, or t
  misc_feature (922)..(922): n is a, c, g, or t
  misc_feature (924)..(924): n is a, c, g, or t
  misc_feature (928)..(929): n is a, c, g, or t
  misc_feature (931)..(931): n is a, c, g, or t
  misc_feature (936)..(936): n is a, c, g, or t
  misc_feature (938)..(938): n is a, c, g, or t
  misc_feature (940)..(941): n is a, c, g, or t
  misc_feature (947)..(947): n is a, c, g, or t
  misc_feature (949)..(949): n is a, c, g, or t
  misc_feature (951)..(951): n is a, c, g, or t
  misc_feature (953)..(953): n is a, c, g, or t
  misc_feature (958)..(960): n is a, c, g, or t
  misc_feature (967)..(968): n is a, c, g, or t
  misc_feature (974)..(974): n is a, c, g, or t
  misc_feature (984)..(985): n is a, c, g, or t
  misc_feature (987)..(987): n is a, c, g, or t
  misc_feature (989)..(989): n is a, c, g, or t
  misc_feature (991)..(991): n is a, c, g, or t
  misc_feature (998)..(998): n is a, c, g, or t
  misc_feature (1001)..(1001): n is a, c, g, or t
  misc_feature (1004)..(1004): n is a, c, g, or t
  misc_feature (1007)..(1007): n is a, c, g, or t
  misc_feature (1011)..(1011): n is a, c, g, or t
  misc_feature (1013)..(1013): n is a, c, g, or t
  misc_feature (1020)..(1020): n is a, c, g, or t
  misc_feature (1029)..(1030): n is a, c, g, or t
  misc_feature (1034)..(1034): n is a, c, g, or t
  misc_feature (1039)..(1039): n is a, c, g, or t
  misc_feature (1041)..(1041): n is a, c, g, or t
  misc_feature (1047)..(1047): n is a, c, g, or t
  misc_feature (1050)..(1050): n is a, c, g, or t
  misc_feature (1063)..(1063): n is a, c, g, or t
  misc_feature (1065)..(1065): n is a, c, g, or t
  misc_feature (1076)..(1076): n is a, c, g, or t
  misc_feature (1079)..(1080): n is a, c, g, or t
  misc_feature (1082)..(1082): n is a, c, g, or t
  misc_feature (1084)..(1084): n is a, c, g, or t
  misc_feature (1086)..(1088): n is a, c, g, or t
  misc_feature (1098)..(1099): n is a, c, g, or t
  misc_feature (1105)..(1106): n is a, c, g, or t
  misc_feature (1111)..(1111): n is a, c, g, or t
  misc_feature (1114)..(1114): n is a, c, g, or t
  misc_feature (1117)..(1118): n is a, c, g, or t
  misc_feature (1129)..(1129): n is a, c, g, or t
  misc_feature (1144)..(1146): n is a, c, g, or t
  misc_feature (1150)..(1150): n is a, c, g, or t
  misc_feature (1155)..(1156): n is a, c, g, or t
  misc_feature (1158)..(1158): n is a, c, g, or t
  misc_feature (1160)..(1160): n is a, c, g, or t
  misc_feature (1164)..(1165): n is a, c, g, or t
  misc_feature (1167)..(1167): n is a, c, g, or t
  misc_feature (1169)..(1173): n is a, c, g, or t
  misc_feature (1178)..(1178): n is a, c, g, or t
  misc_feature (1181)..(1181): n is a, c, g, or t
  misc_feature (1189)..(1189): n is a, c, g, or t
  misc_feature (1191)..(1191): n is a, c, g, or t
  misc_feature (1196)..(1196): n is a, c, g, or t
  misc_feature (1201)..(1202): n is a, c, g, or t
  misc_feature (1207)..(1207): n is a, c, g, or t
  misc_feature (1210)..(1210): n is a, c, g, or t
  misc_feature (1213)..(1222): n is a, c, g, or t
  misc_feature (1224)..(1224): n is a, c, g, or t
  misc_feature (1227)..(1228): n is a, c, g, or t
  misc_feature (1230)..(1230): n is a, c, g, or t
  misc_feature (1239)..(1239): n is a, c, g, or t
  misc_feature (1241)..(1241): n is a, c, g, or t
  misc_feature (1246)..(1246): n is a, c, g, or t
  misc_feature (1256)..(1256): n is a, c, g, or t
  misc_feature (1262)..(1262): n is a, c, g, or t
  misc_feature (1267)..(1267): n is a, c, g, or t
  misc_feature (1277)..(1277): n is a, c, g, or t
  misc_feature (1285)..(1286): n is a, c, g, or t
  misc_feature (1288)..(1288): n is a, c, g, or t
  misc_feature (1299)..(1299): n is a, c, g, or t
  misc_feature (1301)..(1301): n is a, c, g, or t
  misc_feature (1307)..(1307): n is a, c, g, or t
  misc_feature (1309)..(1309): n is a, c, g, or t
  misc_feature (1316)..(1316): n is a, c, g, or t
  misc_feature (1319)..(1320): n is a, c, g, or t
  misc_feature (1322)..(1322): n is a, c, g, or t
  misc_feature (1327)..(1327): n is a, c, g, or t
  misc_feature (1336)..(1337): n is a, c, g, or t
  misc_feature (1339)..(1339): n is a, c, g, or t
  misc_feature (1341)..(1341): n is a, c, g, or t
  misc_feature (1344)..(1344): n is a, c, g, or t
  misc_feature (1346)..(1346): n is a, c, g, or t
  misc_feature (1353)..(1353): n is a, c, g, or t
  misc_feature (1356)..(1356): n is a, c, g, or t
  misc_feature (1362)..(1362): n is a, c, g, or t
  misc_feature (1364)..(1365): n is a, c, g, or t
  misc_feature (1367)..(1367): n is a, c, g, or t
  misc_feature (1372)..(1372): n is a, c, g, or t
  misc_feature (1375)..(1375): n is a, c, g, or t
  misc_feature (1378)..(1378): n is a, c, g, or t
  misc_feature (1381)..(1382): n is a, c, g, or t
  misc_feature (1384)..(1384): n is a, c, g, or t
  misc_feature (1387)..(1387): n is a, c, g, or t
  misc_feature (1391)..(1391): n is a, c, g, or t
  misc_feature (1394)..(1394): n is a, c, g, or t
  misc_feature (1396)..(1396): n is a, c, g, or t
  misc_feature (1399)..(1400): n is a, c, g, or t
  misc_feature (1410)..(1410): n is a, c, g, or t
  misc_feature (1415)..(1418): n is a, c, g, or t
  misc_feature (1420)..(1420): n is a, c, g, or t
  misc_feature (1422)..(1422): n is a, c, g, or t
  misc_feature (1428)..(1428): n is a, c, g, or t
  misc_feature (1435)..(1436): n is a, c, g, or t
ntagagagattactatgagaggatcgcatcaccactcaccatcacggatcntatttaggtgacactatagaatcgtcgacccacgcgctccgcaggcgccgccgggacgggcacgggcgcgcgggctccggcgggcgccggctgccttcctccgtcgctcgctgtctctcccggccgcattctcctccgctgcggggccgagctctccccagcgctcgcangaaggaagaagggagccgaggacgccgagaagttcccgcggnagccgcggatcccggncaaggcggaggctgcggctccnacggngcangagcgcgatccacggngaggggcgtacggccaaagggtccgcggcgtggagcgctcggaccttccgctctccnccgggcgtgggncgggaccccntganacgcgcccacgaggggcncnagattcctaacttgngcgnngctaggcgnangnaggtgttgcagccgccggagancanatagctgncggcatgatgantntgnagcnagaanttgaacttggcgtcngaagcgnncgccncggattcccccgtaggagctgggtcncnaagggaatgtgttcgcngtnaatncccntngattggcctnagccattcnacagncnccnacgntatgacnaannttttnactaanctgacnaaacgttnnaaaaattatttannatnnnnaaanaattaanatttanagccnanttnnagnttccaantatcnnannaatgnntaaaaacnactncaaanatannttttcctnaanntnnttcaaaaacattnctaaaagattnccnantnncnanttnaancttccttnccttnaantttacatnnttnnnnnnttanaannatnatcgttaaaanctnaacaaaacaaattttnannnntatnnnnnnaaaantntctnnanaaaanantnngaatananantntttannntttcaannaaactntaaaataggnntntntnaaattcnatnatncanaatnanttttttnttatattcnntaantatcncngaaatnaantttttttaaaatnanaattacaaatnttnntncnannntttttttccnnaaaatnntaatncancannttataaaaatnttcttcattaaaaannntttnttttnnantnattnntntnnnnnaacantanatataatntnatatntaaanntaatnttnacnnnnnnnnnnanttnntnatacatatncnatatnaatacctcantttttnatatntttatatatnaaaaatannantttaaattatntnatctantnaataatnaannantcatnttgattaannananaancnattatanatnctaatntnnanttaanatnatnacnnancantttnatnanttnnactatttatntatannnnantnaaaatnatatttnnatataaa

SEQ ID NO: 107 - DNA, 972 bp, Homo Sapiens
  misc_feature (876)..(876): n is a, c, g, or t
  misc_feature (903)..(903): n is a, c, g, or t
  misc_feature (911)..(911): n is a, c, g, or t
  misc_feature (913)..(925): n is a, c, g, or t
  misc_feature (927)..(952): n is a, c, g, or t
  misc_feature (954)..(972): n is a, c, g, or t
aaattagagaaattactatgagaggatcgcatcaccatcaccatcacggatcctatttaggtgacactatagaatcgtcgacccacgcgtccggcaaagcccaagctagaactcactgtctatggcagaaggacatccagagcccattctggagttttgttttttccttctgccagatgctttgtgtcctgtcttccttcctcctcatatttctgtttctcatttgtgttcagttttgtgcagcattgctagcactgcttttgtgaccagaaaaggccataacatggtccaggatcatcattcttctgactctagatgggacacttgacagtgacttgaaacatttgcatattcaggaatgcatgagatttcaagagagcctacagtatgaaatcattttcacaaaataagcagcttgcttctgaaatgctgtctttcccagtagctactcacctgcctctggtggctgggattcagatgccacaaaactgtcagtatctatagaccaggtctgtgccacctcctctctcctctgtgctcagtgaggaggcagtaaatgaagttacaggctagcacaatacctaattcatgtttcccagtacacctgtagatattactgtacttttatgttctcaagaaataagttgttgcctattcagtgttacagatttctttgtttctttttaattaaaatacaagaagcagctgaggaaagggagacaaggtattttatttctgactgattttagaaaaaacttgtgtacatgtgtttggaactgttgaaatgccaagttttctgtataagtgtttttgtaattaaactttcagattttctttgttttttaaaaaagttgatgtgcttgtttgaacatttgntctcattaaaaccttttcctacgttgnaaaaaaanannnnnnnnnnnnnannnnnnnnnnnnnnnnnnnnnnnnnnannnnnnnnnnnnnnnnnnn

SEQ ID NO: 108 - DNA, 1303 bp, Homo Sapiens
  misc_feature (344)..(344): n is a, c, g, or t
  misc_feature (474)..(474): n is a, c, g, or t
  misc_feature (525)..(525): n is a, c, g, or t
  misc_feature (566)..(566): n is a, c, g, or t
  misc_feature (642)..(642): n is a, c, g, or t
  misc_feature (750)..(750): n is a, c, g, or t
  misc_feature (805)..(805): n is a, c, g, or t
  misc_feature (814)..(814): n is a, c, g, or t
  misc_feature (861)..(861): n is a, c, g, or t
  misc_feature (893)..(893): n is a, c, g, or t
  misc_feature (896)..(896): n is a, c, g, or t
  misc_feature (913)..(913): n is a, c, g, or t
  misc_feature (924)..(924): n is a, c, g, or t
  misc_feature (927)..(928): n is a, c, g, or t
  misc_feature (938)..(938): n is a, c, g, or t
  misc_feature (952)..(952): n is a, c, g, or t
  misc_feature (954)..(954): n is a, c, g, or t
  misc_feature (961)..(961): n is a, c, g, or t
  misc_feature (963)..(963): n is a, c, g, or t
  misc_feature (982)..(982): n is a, c, g, or t
  misc_feature (998)..(998): n is a, c, g, or t
  misc_feature (1007)..(1007): n is a, c, g, or t
  misc_feature (1016)..(1016): n is a, c, g, or t
  misc_feature (1019)..(1019): n is a, c, g, or t
  misc_feature (1027)..(1030): n is a, c, g, or t
  misc_feature (1032)..(1032): n is a, c, g, or t
  misc_feature (1042)..(1042): n is a, c, g, or t
  misc_feature (1051)..(1051): n is a, c, g, or t
  misc_feature (1060)..(1060): n is a, c, g, or t
  misc_feature (1074)..(1074): n is a, c, g, or t
  misc_feature (1076)..(1076): n is a, c, g, or t
  misc_feature (1078)..(1080): n is a, c, g, or t
  misc_feature (1086)..(1086): n is a, c, g, or t
  misc_feature (1088)..(1088): n is a, c, g, or t
  misc_feature (1091)..(1091): n is a, c, g, or t
  misc_feature (1100)..(1100): n is a, c, g, or t
  misc_feature (1105)..(1105): n is a, c, g, or t
  misc_feature (1124)..(1124): n is a, c, g, or t
  misc_feature (1127)..(1127): n is a, c, g, or t
  misc_feature (1129)..(1131): n is a, c, g, or t
  misc_feature (1141)..(1141): n is a, c, g, or t
  misc_feature (1146)..(1146): n is a, c, g, or t
  misc_feature (1158)..(1159): n is a, c, g, or t
  misc_feature (1167)..(1167): n is a, c, g, or t
  misc_feature (1184)..(1184): n is a, c, g, or t
  misc_feature (1188)..(1188): n is a, c, g, or t
  misc_feature (1199)..(1200): n is a, c, g, or t
  misc_feature (1203)..(1207): n is a, c, g, or t
  misc_feature (1213)..(1213): n is a, c, g, or t
  misc_feature (1231)..(1232): n is a, c, g, or t
  misc_feature (1234)..(1234): n is a, c, g, or t
  misc_feature (1237)..(1237): n is a, c, g, or t
  misc_feature (1248)..(1248): n is a, c, g, or t
  misc_feature (1254)..(1257): n is a, c, g, or t
  misc_feature (1261)..(1261): n is a, c, g, or t
  misc_feature (1265)..(1265): n is a, c, g, or t
  misc_feature (1267)..(1267): n is a, c, g, or t
  misc_feature (1274)..(1274): n is a, c, g, or t
  misc_feature (1291)..(1291): n is a, c, g, or t
  misc_feature (1295)..(1295): n is a, c, g, or t
  misc_feature (1298)..(1298): n is a, c, g, or t
  misc_feature (1300)..(1300): n is a, c, g, or t
  misc_feature (1302)..(1303): n is a, c, g, or t
tagagaaattactatgagaggatcgcatcaccatcaccatcacggatcctatttaggtgacactatagaatcgtcgacccacgcgttccgcccacgcgtccgcccacgcgttccgcgccggcggttgcctcgcggggttgcggcgagcccggcccgcgaacgtcacgtccctgcgcgctccctgcactctcccgagctgcgctaggcgggcgccacggctgcccggcgaaggaaaccgaaaccgagtccgggcccgtccctccgcggccccatccgcccggtgcacccggggtcgcgctcgccaggccgcggagcccagagctgcgcgcacgaaccgtgcgccnggagggcgtgggcgtggcgccgaagggtcccgggtcttcgacgcctctgcggcggctcctccctccttgcagttggatccctggcgggtgcggcccggcccggcccgtgagcggcgcacagaatgggccnatgctgcttctacacggcggggacgttgtccctgctcctgctggtgaccancgtcacgctgctggtggcccgggtcttccagaaggctgtanaccagagtatcgagaagaaaattgtgttaaggaatggtactgaggcatttgactcctgggagaagccccctctgcntgtgtatactcagttctatttcttcaatgtcaccaatccagaggagatcctcagaggggagacccctcgggtggaaaaaatggggccatacacctacagggaactcanaaacaaagcaaatattcaatttggagataatggaacaacaatatctgctgttaanaacaaaggnctatgtttttgaacgaaaaccaatctgtttggaaaaccctaaaattnaactttaattaaaaaatttaaataattcctgnaantgacttgtcaaaaaaantgggtcccaangtnnactttcctcnagggaaaatcatcnanggcccantntttaaaaagccttattaancaaaaaactttttttntgaaatcanaacaagttnaanaaaatttnnnntnttgggggctnaaaaaaaanaaaaaattnttgtcccctttaancnannntttttnanggnccaaaaatnttttncccaaattttgggcctaanttntnnnaaaaaaaaanggggnaaataaaaggannggaaaaantaattttttttttaaantggnaaaaaaaaaannttnnnnntttaantttttaaaaaaaattttnngnaangaggaaatggnaaaaannnntccntttnanggggggnaaaaaaaaaaaaaattntaanatntnann

SEQ ID NO: 109 - DNA, 1195 bp, Homo Sapiens
  misc_feature (831)..(831): n is a, c, g, or t
  misc_feature (856)..(856): n is a, c, g, or t
  misc_feature (886)..(886): n is a, c, g, or t
  misc_feature (892)..(892): n is a, c, g, or t
  misc_feature (901)..(901): n is a, c, g, or t
  misc_feature (904)..(904): n is a, c, g, or t
  misc_feature (907)..(907): n is a, c, g, or t
  misc_feature (912)..(912): n is a, c, g, or t
  misc_feature (919)..(919): n is a, c, g, or t
  misc_feature (927)..(927): n is a, c, g, or t
  misc_feature (948)..(948): n is a, c, g, or t
  misc_feature (955)..(955): n is a, c, g, or t
  misc_feature (985)..(985): n is a, c, g, or t
  misc_feature (987)..(987): n is a, c, g, or t
  misc_feature (989)..(989): n is a, c, g, or t
  misc_feature (1005)..(1005): n is a, c, g, or t
  misc_feature (1009)..(1009): n is a, c, g, or t
  misc_feature (1018)..(1018): n is a, c, g, or t
  misc_feature (1024)..(1024): n is a, c, g, or t
  misc_feature (1027)..(1027): n is a, c, g, or t
  misc_feature (1057)..(1057): n is a, c, g, or t
  misc_feature (1077)..(1077): n is a, c, g, or t
  misc_feature (1095)..(1095): n is a, c, g, or t
  misc_feature (1100)..(1100): n is a, c, g, or t
  misc_feature (1103)..(1103): n is a, c, g, or t
  misc_feature (1110)..(1110): n is a, c, g, or t
  misc_feature (1120)..(1121): n is a, c, g, or t
  misc_feature (1139)..(1140): n is a, c, g, or t
  misc_feature (1145)..(1145): n is a, c, g, or t
  misc_feature (1174)..(1174): n is a, c, g, or t
  misc_feature (1177)..(1177): n is a, c, g, or t
  misc_feature (1179)..(1180): n is a, c, g, or t
  misc_feature (1182)..(1182): n is a, c, g, or t
gattagagagaattactatgagaggatcgcatcaccatcaccatcacggatcctatttaggtgacactatagaatcgtcgacccacgcgtccgcacacagggcgtgcaggccccagcgtggggaggaacgacattcgagtgcagctgctcgactatgtcatcagctccttttaccccgagatccaggctgctcatgccagcgacagcgtgcagagaaatgctgccttcttccgggaggtgacgcggcgcacggcgcggatggtggccgagtggcagtgtgtgggcttctgccacggcgtgctcaacaccgacaacatgagcatcctggggctcaccatcgactacgggccctttggcttcctggacaggtacgaccccgaccacgtgtgcaatgcctccgacaacaccggccgctacgcgtacagcaagcagcccgaggtgtgcaggtggaacctgcggaagctggccgaggccctgcagccggaactgcccctggagctgggggaggccatcctggccgaggagtttgacgccgagttccaaaggcactacctgcagaagatgcgcaggaagctgggcctcgtgcaggtggagctggaggaagacggggcgctggtgtccaagctcctggagaccatgcatctgaccggtgccgacttcacaaacaccttctacttgctgagctccttcccagtggagctagagtcgccaggcctggcggaattcctggccaggctgatggagcagtgtgcctccctggaggagctgaggctggccttccggccccagatggatccccggcagctatccatgatgctgatgctggcgcantcaaacccgcagctgttcgcgcttnatgggcacccgggcaggcatcgccaggganctggancgtgtggancancantctcngctggancacctgantgcggcaaaactgcaaaacangaaccanggccactgggctgactggctacaggcgtanananccccggctggacaagnactnggaaaggcnctgggnacnctgccccctggcaggctgaacacgtgcccntgaagcaccccaacaacccnaaatacgtgctgaagaantaatnccnccaaaangccatcaagnnttccaaaccggggaattnncaaangggcgggggggtttaaaaatattggaaanccntnncnctgggaagggggg

SEQ ID NO: 110 - DNA, 1426 bp, Homo Sapiens
  misc_feature (1)..(1): n is a, c, g, or t
  misc_feature (16)..(16): n is a, c, g, or t
  misc_feature (929)..(929): n is a, c, g, or t
  misc_feature (937)..(937): n is a, c, g, or t
  misc_feature (941)..(941): n is a, c, g, or t
  misc_feature (952)..(952): n is a, c, g, or t
  misc_feature (957)..(957): n is a, c, g, or t
  misc_feature (962)..(962): n is a, c, g, or t
  misc_feature (970)..(970): n is a, c, g, or t
  misc_feature (973)..(973): n is a, c, g, or t
  misc_feature (995)..(996): n is a, c, g, or t
  misc_feature (1000)..(1000): n is a, c, g, or t
  misc_feature (1005)..(1005): n is a, c, g, or t
  misc_feature (1016)..(1016): n is a, c, g, or t
  misc_feature (1041)..(1042): n is a, c, g, or t
  misc_feature (1053)..(1053): n is a, c, g, or t
  misc_feature (1063)..(1063): n is a, c, g, or t
  misc_feature (1075)..(1075): n is a, c, g, or t
  misc_feature (1080)..(1080): n is a, c, g, or t
  misc_feature (1092)..(1092): n is a, c, g, or t
  misc_feature (1099)..(1100): n is a, c, g, or t
  misc_feature (1105)..(1105): n is a, c, g, or t
  misc_feature (1122)..(1122): n is a, c, g, or t
  misc_feature (1126)..(1128): n is a, c, g, or t
  misc_feature (1133)..(1133): n is a, c, g, or t
  misc_feature (1152)..(1153): n is a, c, g, or t
  misc_feature (1165)..(1165): n is a, c, g, or t
  misc_feature (1168)..(1168): n is a, c, g, or t
  misc_feature (1175)..(1175): n is a, c, g, or t
  misc_feature (1180)..(1180): n is a, c, g, or t
  misc_feature (1186)..(1186): n is a, c, g, or t
  misc_feature (1192)..(1193): n is a, c, g, or t
  misc_feature (1197)..(1198): n is a, c, g, or t
  misc_feature (1201)..(1201): n is a, c, g, or t
  misc_feature (1208)..(1209): n is a, c, g, or t
  misc_feature (1212)..(1212): n is a, c, g, or t
  misc_feature (1216)..(1216): n is a, c, g, or t
  misc_feature (1219)..(1219): n is a, c, g, or t
  misc_feature (1224)..(1224): n is a, c, g, or t
  misc_feature (1229)..(1229): n is a, c, g, or t
  misc_feature (1255)..(1255): n is a, c, g, or t
  misc_feature (1264)..(1264): n is a, c, g, or t
  misc_feature (1277)..(1277): n is a, c, g, or t
  misc_feature (1286)..(1286): n is a, c, g, or t
  misc_feature (1296)..(1297): n is a, c, g, or t
  misc_feature (1299)..(1300): n is a, c, g, or t
  misc_feature (1312)..(1314): n is a, c, g, or t
  misc_feature (1316)..(1317): n is a, c, g, or t
  misc_feature (1321)..(1321): n is a, c, g, or t
  misc_feature (1323)..(1323): n is a, c, g, or t
  misc_feature (1325)..(1326): n is a, c, g, or t
  misc_feature (1341)..(1341): n is a, c, g, or t
  misc_feature (1345)..(1346): n is a, c, g, or t
  misc_feature (1353)..(1353): n is a, c, g, or t
  misc_feature (1356)..(1357): n is a, c, g, or t
  misc_feature (1367)..(1367): n is a, c, g, or t
  misc_feature (1369)..(1371): n is a, c, g, or t
  misc_feature (1375)..(1376): n is a, c, g, or t
  misc_feature (1379)..(1380): n is a, c, g, or t
  misc_feature (1391)..(1391): n is a, c, g, or t
  misc_feature (1400)..(1402): n is a, c, g, or t
  misc_feature (1404)..(1404): n is a, c, g, or t
  misc_feature (1407)..(1407): n is a, c, g, or t
  misc_feature (1411)..(1411): n is a, c, g, or t
naaatagagaaattanctatgaagaggatcgcatcaccatcaccatcacggatcctatttaggtgacactatagaatcgtcgacccacgcgtccgcaggtcaccacagacatgtaccaggtgctggctgccaacacgtaccagctggagtgccggggcgtggtcaaggtcaagggcaaaggcgagatgatgacctacttcctcaatggagggcccccgctcagttagcagctgttggccaatggtgccaggcagcctggcctccagaggcatggaagcagcttctctgtgtgccgggggtggcggggaagccatgctccagcccgcagggctgcgctgctgagattttccacttggactccagagcagcttctgcctttgctggtgggcagcggcctctgtcccaggccccggggtgccagcgtcctgcgagcacccagctgaccaaagatgtttccctctgtagaagactctgctagactgggtctgaagcttgagttttctaacaggtgctgctgcacaggtggaaaggagccgtgggaatgtgtgtgtggcacggcccagacaagggcagggctgaggggcctccgactcagctgggggtagacgggctcgaatgtggcctgggagagcctagggggccccaggggtctgcttttctatgtgagcctttaaacttcagacaggccaccaccctgcacctgcaggggctttggcacaggagtgctggctttggagggactgtggccttcatcgtggtcctctgcccacacctccacgcacacagacagtgcccctaggagggagacagaactaattacgagggggaggcaagaggacgccaagcaaggagtggtgattctgaaaaaaatatttattaaataaaacaaaaacaagttctcccgtgccccttctttaaaatatgctaanttgtatgncttntaaaaaacacncaaancaaangaaggacnccnctcgggggggaagggcgggganncccncttgncttttttgaanttttttaatttggaataattgaaannccttggaaaanctccccaaanaaaaattgcccnaattnctaaatttttgnaaaattnnccaanataaaaaaaaacttttnccannnagggngggggggccccattttaanngggggaaagccnggnaaaaacnggggnaaaatngggggnnttcnngcnggggaannggncccncanaaaanggttnccccctttcaaaattggaattttggntttccaaanaacccaaaaaaanggggtggtnttttggcccnntnnccaaaaaaaaannnanngggnancnncccctttttttaaancccnnttttaanttnncccccttttncnnnaaannggnnaaaaaaaaaanttttccccnnnanaanaagnaaaatttccccggag

SEQ ID NO: 111 - DNA, 1200 bp, Homo Sapiens
  misc_feature (840)..(840): n is a, c, g, or t
  misc_feature (895)..(895): n is a, c, g, or t
  misc_feature (924)..(925): n is a, c, g, or t
  misc_feature (933)..(933): n is a, c, g, or t
  misc_feature (935)..(989): n is a, c, g, or t
  misc_feature (993)..(993): n is a, c, g, or t
  misc_feature (1006)..(1006): n is a, c, g, or t
  misc_feature (1018)..(1019): n is a, c, g, or t
  misc_feature (1034)..(1034): n is a, c, g, or t
  misc_feature (1047)..(1047): n is a, c, g, or t
  misc_feature (1054)..(1054): n is a, c, g, or t
  misc_feature (1063)..(1065): n is a, c, g, or t
  misc_feature (1073)..(1073): n is a, c, g, or t
  misc_feature (1075)..(1075): n is a, c, g, or t
  misc_feature (1078)..(1078): n is a, c, g, or t
  misc_feature (1106)..(1106): n is a, c, g, or t
  misc_feature (1118)..(1118): n is a, c, g, or t
  misc_feature (1126)..(1126): n is a, c, g, or t
  misc_feature (1134)..(1134): n is a, c, g, or t
  misc_feature (1137)..(1137): n is a, c, g, or t
  misc_feature (1142)..(1142): n is a, c, g, or t
  misc_feature (1146)..(1147): n is a, c, g, or t
  misc_feature (1150)..(1150): n is a, c, g, or t
  misc_feature (1160)..(1160): n is a, c, g, or t
  misc_feature (1165)..(1165): n is a, c, g, or t
  misc_feature (1183)..(1183): n is a, c, g, or t
  misc_feature (1194)..(1195): n is a, c, g, or t
  misc_feature (1199)..(1199): n is a, c, g, or t
agaaattactatgagaggatcgcatcaccatcaccatcacggatcctatttaggtgacactatagaatcgtcgacccacgcgtccgtgatcactacctgctatggagggcggaaccggaaagtggctgaggcctttgcgcgtacaggaaagtccattgagcagctggagaaagagttgctgaatgggcagaaactgcaggggcccgagacagcccgggagctatacagcatcctccagcacaagggcctggtagacaagtttcccttgttcatggctgtgtacaaggtgtgctacgagggccagccagtgggtgaattcatccactgcctgcagaatcatccagaacatatgtgagtggggccagggcccaggccaggccgcttttttaccccagtggagaccagcagaagcctggggtacctagtcaccaggatctccaggactcccagggagcagagtcttctcatcttttcactggaggacaggaggctatggggcccagctacgcacctggagatcctgaactgtcaagccactggcagcctcatgccaccacatttgccagaaatgcagttgccctgtccctctccagatgtggggctttctccatatcctctgggaggggtggaatcaagccccagtgctgcctgcttggtggcgggggtgatgtatgtggagaagggttgggggagaggccggtagggcaggggctgctagtggctgtctcacatacaccagtaatcctgttaaagggctgaagaagtatcttagccacaggagcgatgaggcaaggattgtcagggaggggtctgggcttctgagctgatgcaggccccaanggacccctttgctgacctctgccaggacccacacagcttcgatggatctcagtgntttgttaacaaaatacaagatctcaaccnnaaaaaaanannnnnnnnnnnnnnnnnnnnnnnnnnnnnnnnnnnnnnnnnnnnnnnnnnnnnnnaaangggggcccccccntaaagggagccnnattaaacttaattanctgaacttggacncctgttnaaaatcccnnnaatgaccncnaanccccctctggatttttcaaaaccctcgntttcccccgggntttttttnttgggganaancccanctannttnggaaaatttncggancttaggaacctaaatggnaaaaaaatccnnggana

SEQ ID NO: 112 - DNA, 1351 bp, Homo Sapiens
  misc_feature (104)..(104): n is a, c, g, or t
  misc_feature (124)..(124): n is a, c, g, or t
  misc_feature (130)..(130): n is a, c, g, or t
  misc_feature (156)..(156): n is a, c, g, or t
  misc_feature (168)..(168): n is a, c, g, or t
  misc_feature (177)..(177): n is a, c, g, or t
  misc_feature (183)..(184): n is a, c, g, or t
  misc_feature (270)..(270): n is a, c, g, or t
  misc_feature (281)..(281): n is a, c, g, or t
  misc_feature (304)..(304): n is a, c, g, or t
  misc_feature (314)..(314): n is a, c, g, or t
  misc_feature (326)..(326): n is a, c, g, or t
  misc_feature (357)..(357): n is a, c, g, or t
  misc_feature (359)..(359): n is a, c, g, or t
  misc_feature (377)..(377): n is a, c, g, or t
  misc_feature (391)..(391): n is a, c, g, or t
  misc_feature (395)..(395): n is a, c, g, or t
  misc_feature (410)..(410): n is a, c, g, or t
  misc_feature (412)..(412): n is a, c, g, or t
  misc_feature (415)..(415): n is a, c, g, or t
  misc_feature (524)..(524): n is a, c, g, or t
  misc_feature (527)..(527): n is a, c, g, or t
  misc_feature (664)..(664): n is a, c, g, or t
  misc_feature (687)..(687): n is a, c, g, or t
  misc_feature (702)..(702): n is a, c, g, or t
  misc_feature (707)..(707): n is a, c, g, or t
  misc_feature (721)..(722): n is a, c, g, or t
  misc_feature (761)..(762): n is a, c, g, or t
  misc_feature (778)..(778): n is a, c, g, or t
  misc_feature (782)..(782): n is a, c, g, or t
  misc_feature (792)..(792): n is a, c, g, or t
  misc_feature (817)..(817): n is a, c, g, or t
  misc_feature (819)..(819): n is a, c, g, or t
  misc_feature (858)..(858): n is a, c, g, or t
  misc_feature (869)..(869): n is a, c, g, or t
  misc_feature (872)..(872): n is a, c, g, or t
  misc_feature (874)..(874): n is a, c, g, or t
  misc_feature (878)..(878): n is a, c, g, or t
  misc_feature (891)..(892): n is a, c, g, or t
  misc_feature (894)..(894): n is a, c, g, or t
  misc_feature (897)..(897): n is a, c, g, or t
  misc_feature (902)..(902): n is a, c, g, or t
  misc_feature (911)..(911): n is a, c, g, or t
  misc_feature (919)..(919): n is a, c, g, or t
  misc_feature (941)..(941): n is a, c, g, or t
  misc_feature (946)..(946): n is a, c, g, or t
  misc_feature (950)..(950): n is a, c, g, or t
  misc_feature (966)..(966): n is a, c, g, or t
  misc_feature (968)..(968): n is a, c, g, or t
  misc_feature (974)..(974): n is a, c, g, or t
  misc_feature (989)..(989): n is a, c, g, or t
  misc_feature (993)..(994): n is a, c, g, or t
  misc_feature (1011)..(1011): n is a, c, g, or t
  misc_feature (1019)..(1019): n is a, c, g, or t
  misc_feature (1026)..(1026): n is a, c, g, or t
  misc_feature (1035)..(1035): n is a, c, g, or t
  misc_feature (1041)..(1041): n is a, c, g, or t
  misc_feature (1059)..(1059): n is a, c, g, or t
  misc_feature (1074)..(1074): n is a, c, g, or t
  misc_feature (1077)..(1077): n is a, c, g, or t
  misc_feature (1084)..(1084): n is a, c, g, or t
  misc_feature (1090)..(1090): n is a, c, g, or t
  misc_feature (1094)..(1096): n is a, c, g, or t
  misc_feature (1098)..(1098): n is a, c, g, or t
  misc_feature (1104)..(1107): n is a, c, g, or t
  misc_feature (1118)..(1118): n is a, c, g, or t
  misc_feature (1121)..(1121): n is a, c, g, or t
  misc_feature (1126)..(1126): n is a, c, g, or t
  misc_feature (1128)..(1128): n is a, c, g, or t
  misc_feature (1138)..(1138): n is a, c, g, or t
  misc_feature (1143)..(1144): n is a, c, g, or t
  misc_feature (1147)..(1147): n is a, c, g, or t
  misc_feature (1149)..(1149): n is a, c, g, or t
  misc_feature (1152)..(1152): n is a, c, g, or t
  misc_feature (1154)..(1154): n is a, c, g, or t
  misc_feature (1161)..(1161): n is a, c, g, or t
  misc_feature (1171)..(1171): n is a, c, g, or t
  misc_feature (1174)..(1174): n is a, c, g, or t
  misc_feature (1177)..(1177): n is a, c, g, or t
  misc_feature (1181)..(1182): n is a, c, g, or t
  misc_feature (1184)..(1184): n is a, c, g, or t
  misc_feature (1187)..(1188): n is a, c, g, or t
  misc_feature (1196)..(1196): n is a, c, g, or t
  misc_feature (1202)..(1206): n is a, c, g, or t
  misc_feature (1208)..(1210): n is a, c, g, or t
  misc_feature (1215)..(1216): n is a, c, g, or t
  misc_feature (1218)..(1218): n is a, c, g, or t
  misc_feature (1223)..(1223): n is a, c, g, or t
  misc_feature (1230)..(1230): n is a, c, g, or t
  misc_feature (1232)..(1232): n is a, c, g, or t
  misc_feature (1236)..(1236): n is a, c, g, or t
  misc_feature (1242)..(1242): n is a, c, g, or t
  misc_feature (1245)..(1245): n is a, c, g, or t
  misc_feature (1249)..(1251): n is a, c, g, or t
  misc_feature (1254)..(1259): n is a, c, g, or t
  misc_feature (1271)..(1271): n is a, c, g, or t
  misc_feature (1273)..(1273): n is a, c, g, or t
  misc_feature (1275)..(1275): n is a, c, g, or t
  misc_feature (1278)..(1282): n is a, c, g, or t
  misc_feature (1284)..(1284): n is a, c, g, or t
  misc_feature (1286)..(1286): n is a, c, g, or t
  misc_feature (1291)..(1291): n is a, c, g, or t
  misc_feature (1300)..(1300): n is a, c, g, or t
  misc_feature (1304)..(1304): n is a, c, g, or t
  misc_feature (1307)..(1307): n is a, c, g, or t
  misc_feature (1312)..(1313): n is a, c, g, or t
  misc_feature (1316)..(1316): n is a, c, g, or t
  misc_feature (1322)..(1322): n is a, c, g, or t
  misc_feature (1325)..(1325): n is a, c, g, or t
  misc_feature (1328)..(1328): n is a, c, g, or t
  misc_feature (1330)..(1332): n is a, c, g, or t
  misc_feature (1335)..(1335): n is a, c, g, or t
  misc_feature (1341)..(1341): n is a, c, g, or t
  misc_feature (1347)..(1347): n is a, c, g, or t
  misc_feature (1350)..(1350): n is a, c, g, or t
tagagaaattactatgagaggatcgcatcaccatcaccatcacggatcctatttaggtgacactatagaatcgtcgacccacgcgtccggtttcattgtgggancattacaactgtgggctccnagtcanatgcagcagatccgcatgtcccttcncgggaaggctgnggtgctgangggcannaacaccatgatgcgcaaggccatccgagggcacctggaaaacaacccagctctggagaaactgctgcctcatatccgggggaatgngggctttgtgntcaccaaggaggacctcactganatcagggacntgttgctggccnataaggtgccagctgctgcccgtgctggtgncnttgccccatgtgaagtcnctgtgccagcccanaacnctggtctcgggcccnanaanacctcctttttccaggctttaggtatcaccactaaaatctccaggggcaccattgaaatcctgagtgatgtgcagctgatcaagactggagacaaagtgggagccagcnaanccacgctgctgaacatgctcaacatctcccccttctcctttgggctggtcatccagcaggtgttcgacaatggcagcatctacaaccctgaagtgcttgatatcacagaggaaactctgcattctcgcttcctgganggtgtccgcaatgttgccagtgnctgtctgcagattgnctacncaactgttgcatcnntaccccattctatcatcaacgggtacaaacgagtcctgnncttgtctgtggaaacngatnacaccttccnacttgctgaaaaagtcaaggccttncntggctgatccatctgcctttgtggctagctgcccctgtnactgctgccanaananctgnttcctgctgctgnngnaancccanctaaaggtngaaacccnaagaaaaaatccgaaggaatcngaacnaagnatatgggaatttgggncncctttnactaaatccccccanaaannaaccctactttaacccngtttttantttgccnaaacaaagnaaaatnaagggcttaacttctttnaaaaaaaaaaaaaanaangggcggnccgccncccnnnangggggnnnnaatttattttnaanttaancnaaaccctggnacccnnggngnaananttcccgnaatggaaccnccnaantccnntnggnnattttttncaaaannnnncnnnggccnncnggggnttttttntngggnaaaacnaantttnnngtnnnnnnaaatttttgggncntnggnnnnnananggggnaaaaatccngggnaanccccnnttnaaaatnccnaangnnnccnaaaaantttttnggnt

SEQ ID NO: 113 - DNA, 1354 bp, Homo Sapiens
  misc_feature (909)..(909): n is a, c, g, or t
  misc_feature (949)..(949): n is a, c, g, or t
  misc_feature (952)..(952): n is a, c, g, or t
  misc_feature (961)..(961): n is a, c, g, or t
  misc_feature (991)..(991): n is a, c, g, or t
  misc_feature (1006)..(1006): n is a, c, g, or t
  misc_feature (1013)..(1013): n is a, c, g, or t
  misc_feature (1016)..(1016): n is a, c, g, or t
  misc_feature (1018)..(1018): n is a, c, g, or t
  misc_feature (1021)..(1021): n is a, c, g, or t
  misc_feature (1028)..(1028): n is a, c, g, or t
  misc_feature (1037)..(1037): n is a, c, g, or t
  misc_feature (1048)..(1049): n is a, c, g, or t
  misc_feature (1055)..(1055): n is a, c, g, or t
  misc_feature (1057)..(1057): n is a, c, g, or t
  misc_feature (1061)..(1061): n is a, c, g, or t
  misc_feature (1069)..(1069): n is a, c, g, or t
  misc_feature (1080)..(1080): n is a, c, g, or t
  misc_feature (1083)..(1083): n is a, c, g, or t
  misc_feature (1089)..(1089): n is a, c, g, or t
  misc_feature (1100)..(1100): n is a, c, g, or t
  misc_feature (1102)..(1102): n is a, c, g, or t
  misc_feature (1109)..(1109): n is a, c, g, or t
  misc_feature (1113)..(1113): n is a, c, g, or t
  misc_feature (1115)..(1115): n is a, c, g, or t
  misc_feature (1118)..(1119): n is a, c, g, or t
  misc_feature (1124)..(1124): n is a, c, g, or t
  misc_feature (1128)..(1128): n is a, c, g, or t
  misc_feature (1130)..(1130): n is a, c, g, or t
  misc_feature (1135)..(1135): n is a, c, g, or t
  misc_feature (1138)..(1139): n is a, c, g, or t
  misc_feature (1144)..(1144): n is a, c, g, or t
  misc_feature (1156)..(1156): n is a, c, g, or t
  misc_feature (1160)..(1160): n is a, c, g, or t
  misc_feature (1164)..(1164): n is a, c, g, or t
  misc_feature (1168)..(1169): n is a, c, g, or t
  misc_feature (1173)..(1174): n is a, c, g, or t
  misc_feature (1182)..(1182): n is a, c, g, or t
  misc_feature (1187)..(1187): n is a, c, g, or t
  misc_feature (1189)..(1190): n is a, c, g, or t
  misc_feature (1194)..(1195): n is a, c, g, or t
  misc_feature (1199)..(1199): n is a, c, g, or t
  misc_feature (1201)..(1202): n is a, c, g, or t
  misc_feature (1204)..(1204): n is a, c, g, or t
  misc_feature (1210)..(1210): n is a, c, g, or t
  misc_feature (1213)..(1213): n is a, c, g, or t
  misc_feature (1218)..(1219): n is a, c, g, or t
  misc_feature (1221)..(1221): n is a, c, g, or t
  misc_feature (1223)..(1223): n is a, c, g, or t
  misc_feature (1227)..(1227): n is a, c, g, or t
  misc_feature (1237)..(1237): n is a, c, g, or t
  misc_feature (1243)..(1244): n is a, c, g, or t
  misc_feature (1246)..(1249): n is a, c, g, or t
  misc_feature (1252)..(1252): n is a, c, g, or t
  misc_feature (1257)..(1257): n is a, c, g, or t
  misc_feature (1265)..(1266): n is a, c, g, or t
  misc_feature (1270)..(1270): n is a, c, g, or t
  misc_feature (1276)..(1276): n is a, c, g, or t
  misc_feature (1283)..(1283): n is a, c, g, or t
  misc_feature (1286)..(1286): n is a, c, g, or t
  misc_feature (1289)..(1289): n is a, c, g, or t
  misc_feature (1291)..(1291): n is a, c, g, or t
  misc_feature (1296)..(1297): n is a, c, g, or t
  misc_feature (1300)..(1301): n is a, c, g, or t
  misc_feature (1305)..(1305): n is a, c, g, or t
  misc_feature (1313)..(1313): n is a, c, g, or t
  misc_feature (1315)..(1318): n is a, c, g, or t
  misc_feature (1320)..(1320): n is a, c, g, or t
  misc_feature (1322)..(1323): n is a, c, g, or t
  misc_feature (1328)..(1329): n is a, c, g, or t
  misc_feature (1335)..(1341): n is a, c, g, or t
  misc_feature (1354)..(1354): n is a, c, g, or t
tagagaaattactatgagaggatcgcatcaccatcaccatcacggatcctatttaggtgacactatagaatcgtcgacccacgcgtccgccaggacgcacgggcatggggaccccggggagccagatggcccccgtgagcctgaatgtgccccgacccaaccaggtgagcgggcccgtcatgcccagcatgcctcccgggcagtggcagcaggcgccccttccccagcagcagcccatgccaggcttgcccaggcctgtgatatccatgcaggcccaggcggccgtggctgggccccggatgcccagcgtgcagccacccaggagcatctcacccagcgctctgcaagacctgctgcggaccctgaagtcgcccagctcccctcagcagcaacagcaggtgctgaacattctcaaatcaaacccgcagctaatggcagctttcatcaaacagcgcacagccaagtacgtggccaatcagcccggcatgcagccccagcctggcctccagtcccagcccggcatgcaaccccagcctggcatgcaccagcagcccagcctgcagaacctgaatgccatgcaggctggcgtgccgcggcccggtgtgcctccacagcagcaggcgatgggaggcctgaacccccagggccaggccttgaacatcatgaacccaggacacaaccccaacatggcgagtatgaatccacagtaccgagaaatgttacggaggcagctgctgcagcagcagcagcaacagcagcagcaacaacagcagcaacagcagcagcagcaagggagtgccggcatggctgggggcatggcggggcacggccagttccagcagcctcaaggacccggaagctacccaccggccatgcagcagcagcagcgcatgcagcagcatctccccntccagggcagctccatgggccagatggcggctcaaatggnaancttggccanatggggcaacccggggctgggggcaaaaancacccccaaatccancaagccntgnancancggattntgcagcaanagcaaatgaannaccaantnggtncccaggcnagccaaacccnganccccanaaaaaatgttntnaagaaancaangnctnnattcntggnanaaatnccnntcttnaaaaaagggggnttcnaccntttnntttnngggccatncaacntnnattnnccgntnnangaaaanccnctttnnanantttnccaaaggttncccccnnannnntcnggggnttttatannaatnggaacnaaaaaangtnccntnaaccnnaanntttnaatttttngnnnngnannaaaanngggggnnnnnnnttttttttttttn

SEQ ID NO: 114 - DNA, 1198 bp, Homo Sapiens
  misc_feature (866)..(866): n is a, c, g, or t
  misc_feature (992)..(992): n is a, c, g, or t
  misc_feature (994)..(994): n is a, c, g, or t
  misc_feature (1011)..(1011): n is a, c, g, or t
  misc_feature (1016)..(1016): n is a, c, g, or t
  misc_feature (1020)..(1020): n is a, c, g, or t
  misc_feature (1026)..(1027): n is a, c, g, or t
  misc_feature (1029)..(1029): n is a, c, g, or t
  misc_feature (1048)..(1048): n is a, c, g, or t
  misc_feature (1050)..(1050): n is a, c, g, or t
  misc_feature (1057)..(1057): n is a, c, g, or t
  misc_feature (1068)..(1068): n is a, c, g, or t
  misc_feature (1075)..(1075): n is a, c, g, or t
  misc_feature (1077)..(1077): n is a, c, g, or t
  misc_feature (1081)..(1081): n is a, c, g, or t
  misc_feature (1087)..(1087): n is a, c, g, or t
  misc_feature (1095)..(1095): n is a, c, g, or t
  misc_feature (1097)..(1097): n is a, c, g, or t
  misc_feature (1102)..(1102): n is a, c, g, or t
  misc_feature (1110)..(1110): n is a, c, g, or t
  misc_feature (1127)..(1128): n is a, c, g, or t
  misc_feature (1131)..(1131): n is a, c, g, or t
  misc_feature (1133)..(1133): n is a, c, g, or t
  misc_feature (1152)..(1152): n is a, c, g, or t
  misc_feature (1156)..(1156): n is a, c, g, or t
  misc_feature (1170)..(1170): n is a, c, g, or t
  misc_feature (1176)..(1176): n is a, c, g, or t
  misc_feature (1181)..(1181): n is a, c, g, or t
  misc_feature (1183)..(1183): n is a, c, g, or t
  misc_feature (1186)..(1188): n is a, c, g, or t
  misc_feature (1194)..(1194): n is a, c, g, or t
  misc_feature (1198)..(1198): n is a, c, g, or t
tagagaaattactatgagaggatcgcatcaccatcaccatcacggatcctatttaggtgacactatagaatcgtcgacccacgcgtccgctgacatcatccagggcaagctggaccagcgaaaccagctgctggaagtggatttctgcattggccgtgacatccgaaagaaggatatcaataatattgtcaagaccctgcatgaatggtgtgatggctgtgaagcagttctactgggcatcgagcagcaagttctgagagccaaccagtacaaagagaaccacaaccgaactcagcagcaggtagaagcagaggttaccaacatcaagaagacactcaaagccaccgcatcctcctcggctcaggagatggagcagcagctggctgaacgggagtgtccccctcacgctgagcagaggcagcccaccaagaagatgtccaaagtgaaaggtctggtctccagccgccactagggccggctggggcagctggcactcaccaggcctgggtcaggtggggaggggacaccaagggcccatttcctcccctctctacctgcagtgagttccagacctgcccgtcccctcaccagcgcctccccaccctgttggtactgttccagaaaaactgttactccccctcacccactccctccttccccagttgttcccttcagactcaggggctccaccaatgccatcccaaaacagggtcagacactgcccagcttccctccaggaggttcttgtctctgtgtaagggcttgtctccctcccagtttttcttttgctccacgtcattttgtcaggctggttataagccggaggcagctttaaccagcccccagggatgattgtttgaaaggangccccttccccttgtgaaggagggggcactcctctccagcccctggtaccacagtcctcacgaatggtgcagtgatttctagccaggcgtcaagatgcgctgcttttcctctcctgcctcatcccntngttggcagctccatttnagccntggnaagganntnatttttgggcttttttttntnaaacccncgggttttttnccccttnancccncctccnatttccantnttttnaaagggcnggggtgaaaaaccctgnnatntnaaaaaaaaaaaaagggggnttgntttttttgggtggnaaaaangtttntnccnnntggggntttn

SEQ ID NO: 115 - DNA, 1400 bp, Homo Sapiens
  misc_feature (2)..(2): n is a, c, g, or t
  misc_feature (9)..(9): n is a, c, g, or t
  misc_feature (969)..(969): n is a, c, g, or t
  misc_feature (972)..(972): n is a, c, g, or t
  misc_feature (975)..(975): n is a, c, g, or t
  misc_feature (1004)..(1004): n is a, c, g, or t
  misc_feature (1026)..(1026): n is a, c, g, or t
  misc_feature (1028)..(1028): n is a, c, g, or t
  misc_feature (1049)..(1049): n is a, c, g, or t
  misc_feature (1065)..(1065): n is a, c, g, or t
  misc_feature (1082)..(1082): n is a, c, g, or t
  misc_feature (1096)..(1097): n is a, c, g, or t
  misc_feature (1105)..(1105): n is a, c, g, or t
  misc_feature (1113)..(1113): n is a, c, g, or t
  misc_feature (1127)..(1127): n is a, c, g, or t
  misc_feature (1138)..(1138): n is a, c, g, or t
  misc_feature (1142)..(1142): n is a, c, g, or t
  misc_feature (1149)..(1150): n is a, c, g, or t
  misc_feature (1153)..(1153): n is a, c, g, or t
  misc_feature (1158)..(1158): n is a, c, g, or t
  misc_feature (1163)..(1163): n is a, c, g, or t
  misc_feature (1172)..(1172): n is a, c, g, or t
  misc_feature (1174)..(1175): n is a, c, g, or t
  misc_feature (1179)..(1179): n is a, c, g, or t
  misc_feature (1211)..(1211): n is a, c, g, or t
  misc_feature (1216)..(1216): n is a, c, g, or t
  misc_feature (1233)..(1234): n is a, c, g, or t
  misc_feature (1247)..(1248): n is a, c, g, or t
  misc_feature (1252)..(1252): n is a, c, g, or t
  misc_feature (1260)..(1260): n is a, c, g, or t
  misc_feature (1266)..(1267): n is a, c, g, or t
  misc_feature (1272)..(1272): n is a, c, g, or t
  misc_feature (1282)..(1282): n is a, c, g, or t
  misc_feature (1286)..(1286): n is a, c, g, or t
  misc_feature (1290)..(1290): n is a, c, g, or t
  misc_feature (1293)..(1293): n is a, c, g, or t
  misc_feature (1304)..(1304): n is a, c, g, or t
  misc_feature (1311)..(1311): n is a, c, g, or t
  misc_feature (1315)..(1315): n is a, c, g, or t
  misc_feature (1318)..(1318): n is a, c, g, or t
  misc_feature (1333)..(1333): n is a, c, g, or t
  misc_feature (1338)..(1339): n is a, c, g, or t
  misc_feature (1356)..(1357): n is a, c, g, or t
  misc_feature (1362)..(1362): n is a, c, g, or t
  misc_feature (1372)..(1372): n is a, c, g, or t
  misc_feature (1375)..(1376): n is a, c, g, or t
  misc_feature (1384)..(1384): n is a, c, g, or t
  misc_feature (1387)..(1387): n is a, c, g, or t
  misc_feature (1400)..(1400): n is a, c, g, or t
antagaganattactatgagaggatcgcatcaccatcaccatcacggatcctatttaggtgacactatagaatcgtcgacccacgcgtccggacgaggggaggagccgctggctcccagccccgccgcgatgagcctcggccgcctttgccgcctactgaagccggcgctgctctgtggggctctggccgcgcctggcctggccgggaccatgtgcgcgtcccgggacgactggcgctgtgcgcgctccatgcacgagttttccgccaaggacatcgacgggcacatggttaacctggacaagtaccggggcttcgtgtgcatcgtcaccaacgtggcctcccagtgaggcaagaccgaagtaaactacactcagctcgtcgacctgcacgcccgatacgctgagtgtggtttgcggatcctggccttcccgtgtaaccagttcgggaagcaggagccagggagtaacgaagagatcaaagagttcgccgcgggctacaacgtcaaattcgatatgttcagcaagatctgcgtgaacggggacgacgcccacccgctgtggaagtggatgaagatccaacccaagggcaagggcatcctgggaaatgccatcaagtggaacttcaccaagttcctcatcgacaagaacggctgcgtggtgaagcgctacggacccatggaggagcccctggtgatagagaaggacctgccccactatttctagctccacaagtgtgtggccccgcccgagcccctgcccacgcccttggagccttccaccggcactcatgacggcctgcctgcaaacctgctggtggggcagaacccgaaaatccagcgtgcaccccgccggaggaaggtccccatggcctgctgggcttggctcggcgccccacccctggctaccttgtgggaataaacagacaaattagcctgctggaaaaaaaaaaaaaaaaaaaaaaaaaaaaanggnggncccctccctatagtggagtcgtaattaancttaaattaacttgaaccttgnanttcctgtttgaaaaaatccantaatgacctccaaaanctcccttttggaatttntttcaaaaaccctnnggttgccncccggggntttttttttttggnaaaaatccaanttancttgggnnaanttttncgganctaaagaancnnaaantggaaaaaaaaatccctggaaaaacccccctnttaanaatcccaatggccatcnnaaaaaaaattttnnaggntttcaccngttgtnnaaagnaccaaaaacnaaantttnccnggaaaataagnccttttnaaanccntaaaaaaaaacccanttttnncgcctttttcacttttnnccccngaaaaggccnccnnatttttanganaaaaagggaatgn

SEQ ID NO: 116 - DNA, 1355 bp, Homo Sapiens
  misc_feature (817)..(817): n is a, c, g, or t
  misc_feature (965)..(965): n is a, c, g, or t
  misc_feature (975)..(975): n is a, c, g, or t
  misc_feature (979)..(979): n is a, c, g, or t
  misc_feature (1004)..(1004): n is a, c, g, or t
  misc_feature (1022)..(1022): n is a, c, g, or t
  misc_feature (1044)..(1044): n is a, c, g, or t
  misc_feature (1046)..(1046): n is a, c, g, or t
  misc_feature (1055)..(1055): n is a, c, g, or t
  misc_feature (1062)..(1063): n is a, c, g, or t
  misc_feature (1067)..(1067): n is a, c, g, or t
  misc_feature (1069)..(1069): n is a, c, g, or t
  misc_feature (1078)..(1078): n is a, c, g, or t
  misc_feature (1091)..(1091): n is a, c, g, or t
  misc_feature (1098)..(1098): n is a, c, g, or t
  misc_feature (1101)..(1101): n is a, c, g, or t
  misc_feature (1106)..(1107): n is a, c, g, or t
  misc_feature (1115)..(1116): n is a, c, g, or t
  misc_feature (1122)..(1123): n is a, c, g, or t
  misc_feature (1125)..(1125): n is a, c, g, or t
  misc_feature (1128)..(1129): n is a, c, g, or t
  misc_feature (1132)..(1132): n is a, c, g, or t
  misc_feature (1149)..(1149): n is a, c, g, or t
  misc_feature (1164)..(1164): n is a, c, g, or t
  misc_feature (1168)..(1168): n is a, c, g, or t
  misc_feature (1170)..(1170): n is a, c, g, or t
  misc_feature (1172)..(1172): n is a, c, g, or t
  misc_feature (1174)..(1174): n is a, c, g, or t
  misc_feature (1197)..(1197): n is a, c, g, or t
  misc_feature (1205)..(1205): n is a, c, g, or t
  misc_feature (1212)..(1213): n is a, c, g, or t
  misc_feature (1220)..(1222): n is a, c, g, or t
  misc_feature (1226)..(1229): n is a, c, g, or t
  misc_feature (1231)..(1231): n is a, c, g, or t
  misc_feature (1234)..(1236): n is a, c, g, or t
  misc_feature (1239)..(1241): n is a, c, g, or t
  misc_feature (1243)..(1243): n is a, c, g, or t
  misc_feature (1247)..(1247): n is a, c, g, or t
  misc_feature (1249)..(1250): n is a, c, g, or t
  misc_feature (1252)..(1254): n is a, c, g, or t
  misc_feature (1261)..(1262): n is a, c, g, or t
  misc_feature (1264)..(1265): n is a, c, g, or t
  misc_feature (1267)..(1267): n is a, c, g, or t
  misc_feature (1272)..(1272): n is a, c, g, or t
  misc_feature (1277)..(1279): n is a, c, g, or t
  misc_feature (1281)..(1282): n is a, c, g, or t
  misc_feature (1285)..(1286): n is a, c, g, or t
  misc_feature (1288)..(1288): n is a, c, g, or t
  misc_feature (1295)..(1295): n is a, c, g, or t
  misc_feature (1299)..(1299): n is a, c, g, or t
  misc_feature (1303)..(1304): n is a, c, g, or t
  misc_feature (1308)..(1309): n is a, c, g, or t
  misc_feature (1311)..(1311): n is a, c, g, or t
  misc_feature (1316)..(1325): n is a, c, g, or t
  misc_feature (1329)..(1329): n is a, c, g, or t
  misc_feature (1334)..(1337): n is a, c, g, or t
  misc_feature (1339)..(1339): n is a, c, g, or t
  misc_feature (1343)..(1343): n is a, c, g, or t
  misc_feature (1345)..(1347): n is a, c, g, or t
  misc_feature (1350)..(1353): n is a, c, g, or t
caattagagagattactatgagaggatcgcatcaccatcaccatcacggatcctatttaggtgacactatagaatcgtcgacccacgcgtccggttttggcgcatgggcggagccgtagttacggtcgactggggcgtcgtccctagcccgggagccgggtctctggagtcgcggcccggggttcacgatgtccgacgaggaagcgaggcagagcggaggctcctcgcaggccggcgtcgtgactgtcagcgacgtccaggagctgatgcggcgcaaggaggagatagaagcgcagatcaaggccaactatgacgtgctggaaagccaaaaaggcattgggatgaacgagccgctggtggactgtgagggctacccccggtcagacgtggacctgtaccaagtccgcaccgccaggcacaacatcatatgcctgcagaatgatcacaaggcagtgatgaagcaggtggaggaggccctgcaccagctgcacgctcgcgacaaggagaagcaggcccgggacatggctgaggcccacaaagaggccatgagccgcaaactgggtcagagtgagagccagggccctccacgggccttcgccaaagtgaacagcatcagccccggctccccagccagcatcgcgggtctgcaagtggatgatgagattgtggagttcggctctgtgaacacccagaacttccagtcactgcataacattggcagtgtggtgcagcacagtgaggggaagcccctgaatgtgacagtgatccgcaggggggaaaaacaccagcttaaacttgttccaacacgctgggcagnaaaaggactgctgggctgcaacattattcctctgcaaagatgattgtcccctggggaacagtaacaggaaagcatcttcccttgccctggacttgggtctagggatttccacttgtcttctctcctgaaacataaggatttggaaaangcttgtaacntgancttctgtgtggtggcagtactgtgnccaccatttaatctcccntggaataaggcattcttaaaantnaggcttggnccctttnnaaantnaggccccgnccctaaaaagaanttcctgnatnggggnnaatgggcnnaaattnntntgnnagnacggggggaatattatnattttttaaaaaaantttnangngntaaaaaaaaaaaaaaaaaggggncccccccntaagggnncaataannnattnnnnanctnnnccnnntnaaancnnannncccaaanncnngnttttnaaacnnntnnccnngnttttttnaaancccnnttgnnanttttnnnnnnnnnnaagnaaaannnnancccntnnnccnnnnaa

SEQ ID NO: 117 - DNA, 1307 bp, Homo Sapiens
  misc_feature (843)..(843): n is a, c, g, or t
  misc_feature (915)..(915): n is a, c, g, or t
  misc_feature (931)..(931): n is a, c, g, or t
  misc_feature (942)..(942): n is a, c, g, or t
  misc_feature (947)..(947): n is a, c, g, or t
  misc_feature (957)..(957): n is a, c, g, or t
  misc_feature (965)..(965): n is a, c, g, or t
  misc_feature (977)..(977): n is a, c, g, or t
  misc_feature (993)..(993): n is a, c, g, or t
  misc_feature (1001)..(1001): n is a, c, g, or t
  misc_feature (1009)..(1009): n is a, c, g, or t
  misc_feature (1020)..(1020): n is a, c, g, or t
  misc_feature (1041)..(1041): n is a, c, g, or t
  misc_feature (1054)..(1054): n is a, c, g, or t
  misc_feature (1061)..(1061): n is a, c, g, or t
  misc_feature (1064)..(1064): n is a, c, g, or t
  misc_feature (1066)..(1066): n is a, c, g, or t
  misc_feature (1071)..(1071): n is a, c, g, or t
  misc_feature (1073)..(1075): n is a, c, g, or t
  misc_feature (1085)..(1085): n is a, c, g, or t
  misc_feature (1089)..(1089): n is a, c, g, or t
  misc_feature (1094)..(1094): n is a, c, g, or t
  misc_feature (1096)..(1096): n is a, c, g, or t
  misc_feature (1102)..(1102): n is a, c, g, or t
  misc_feature (1105)..(1105): n is a, c, g, or t
  misc_feature (1111)..(1112): n is a, c, g, or t
  misc_feature (1123)..(1123): n is a, c, g, or t
  misc_feature (1137)..(1137): n is a, c, g, or t
  misc_feature (1140)..(1140): n is a, c, g, or t
  misc_feature (1143)..(1143): n is a, c, g, or t
  misc_feature (1145)..(1145): n is a, c, g, or t
  misc_feature (1148)..(1148): n is a, c, g, or t
  misc_feature (1153)..(1153): n is a, c, g, or t
  misc_feature (1155)..(1155): n is a, c, g, or t
  misc_feature (1157)..(1157): n is a, c, g, or t
  misc_feature (1161)..(1161): n is a, c, g, or t
  misc_feature (1172)..(1172): n is a, c, g, or t
  misc_feature (1174)..(1174): n is a, c, g, or t
  misc_feature (1178)..(1178): n is a, c, g, or t
  misc_feature (1190)..(1191): n is a, c, g, or t
  misc_feature (1194)..(1194): n is a, c, g, or t
  misc_feature (1196)..(1196): n is a, c, g, or t
  misc_feature (1199)..(1199): n is a, c, g, or t
  misc_feature (1205)..(1208): n is a, c, g, or t
  misc_feature (1210)..(1210): n is a, c, g, or t
  misc_feature (1214)..(1216): n is a, c, g, or t
  misc_feature (1218)..(1218): n is a, c, g, or t
  misc_feature (1221)..(1223): n is a, c, g, or t
  misc_feature (1225)..(1228): n is a, c, g, or t
  misc_feature (1230)..(1231): n is a, c, g, or t
  misc_feature (1234)..(1234): n is a, c, g, or t
  misc_feature (1237)..(1239): n is a, c, g, or t
  misc_feature (1242)..(1242): n is a, c, g, or t
  misc_feature (1244)..(1244): n is a, c, g, or t
  misc_feature (1247)..(1247): n is a, c, g, or t
  misc_feature (1251)..(1251): n is a, c, g, or t
  misc_feature (1253)..(1253): n is a, c, g, or t
  misc_feature (1255)..(1255): n is a, c, g, or t
  misc_feature (1260)..(1261): n is a, c, g, or t
  misc_feature (1263)..(1263): n is a, c, g, or t
  misc_feature (1266)..(1272): n is a, c, g, or t
  misc_feature (1276)..(1281): n is a, c, g, or t
  misc_feature (1283)..(1285): n is a, c, g, or t
  misc_feature (1291)..(1291): n is a, c, g, or t
  misc_feature (1294)..(1294): n is a, c, g, or t
  misc_feature (1296)..(1296): n is a, c, g, or t
  misc_feature (1298)..(1298): n is a, c, g, or t
  misc_feature (1303)..(1303): n is a, c, g, or t
  misc_feature (1305)..(1305): n is a, c, g, or t
  misc_feature (1307)..(1307): n is a, c, g, or t
tagagaaattactatgagaggatcgcatcaccatcaccatcacggatcctatttaggtgacactatagaatcgtcgacccacgcgtccgggaaacgcaagtgcctgcgagagggcttcatcactgaggactgggaccagcccgtggccgactggaagatcttctacttcttacggagcctgcacaggaacctcctgcacaacccgtgcgctgaagaggggttcgagttctggagcctggatgtgaatggaggcgatgagtggaaggtggaggatctctctcgagaccagaggaaggaattccccaatgaccaggtcaagaaatacttcgttacttcatattagtaagatccggggacttggggtaggggaaagcccaaatcaatttaccctggggtctctcccaccctggaaggggcagtcctagcccctcactgccctagtggtgagcccagcccctcccacccctctgcctgcccccagcacctgcctcaagtcccaggtggtggacctcaaggccgaagggtattgggaggagctgatggataccacacggccggacatcgaggtcaaggactggttcgcagccaggccagattgcgggtccaagtaccagctgtgcgttcagctcctgtcgtccgcgcacgcgcctctggggaccttccagccagacccggcgaccatccagcagaagagcgatgccaagtggagggaggtctcccacacattctccaactacccgcccggcgtccgctacatctggtttcagcacggcggcgtggacactcattactgggccggctggtacggcccgagggtcaccaacagcagcatcaccatcgggnccccgctgccctgacaccccctgagcccccatctgctgaaccctgactggtaaacaactgctgtcaaaaaanggctgggcttgggaangggaagtggangccangtgtccccanacctctanccttgcccctancacctctttttgtgancctctcangggggcanccctcccatgntggggtcgggccactctcccnaaagtcttgactnatgatgnccngnaaccngnnnggccctttcnaaangaacncngaaatnggnagggcnntgttccctggnccctcaaaatcaantgnagncnccngattntncncctncccccgggacntnaccntttttttacccnnaangnagnaaaaannnnantttnnntnccnnngnnnngnnggnggnnnttntnaanttgnangnggggnntnggnnnnnnncccnnnnnncnnntttttnccncncnaaaangntn

SEQ ID NO: 118 - DNA, 1298 bp, Homo Sapiens
  misc_feature (5)..(7): n is a, c, g, or t
  misc_feature (12)..(12): n is a, c, g, or t
  misc_feature (345)..(345): n is a, c, g, or t
  misc_feature (361)..(361): n is a, c, g, or t
  misc_feature (429)..(429): n is a, c, g, or t
  misc_feature (475)..(475): n is a, c, g, or t
  misc_feature (496)..(496): n is a, c, g, or t
  misc_feature (505)..(505): n is a, c, g, or t
  misc_feature (520)..(520): n is a, c, g, or t
  misc_feature (531)..(531): n is a, c, g, or t
  misc_feature (534)..(534): n is a, c, g, or t
  misc_feature (538)..(539): n is a, c, g, or t
  misc_feature (541)..(541): n is a, c, g, or t
  misc_feature (545)..(545): n is a, c, g, or t
  misc_feature (552)..(553): n is a, c, g, or t
  misc_feature (558)..(558): n is a, c, g, or t
  misc_feature (562)..(562): n is a, c, g, or t
  misc_feature (568)..(568): n is a, c, g, or t
  misc_feature (570)..(570): n is a, c, g, or t
  misc_feature (572)..(572): n is a, c, g, or t
  misc_feature (581)..(581): n is a, c, g, or t
  misc_feature (588)..(588): n is a, c, g, or t
  misc_feature (592)..(592): n is a, c, g, or t
  misc_feature (598)..(598): n is a, c, g, or t
  misc_feature (601)..(602): n is a, c, g, or t
  misc_feature (604)..(606): n is a, c, g, or t
  misc_feature (608)..(608): n is a, c, g, or t
  misc_feature (614)..(615): n is a, c, g, or t
  misc_feature (617)..(617): n is a, c, g, or t
  misc_feature (620)..(622): n is a, c, g, or t
  misc_feature (624)..(624): n is a, c, g, or t
  misc_feature (629)..(629): n is a, c, g, or t
  misc_feature (632)..(632): n is a, c, g, or t
  misc_feature (638)..(638): n is a, c, g, or t
  misc_feature (640)..(640): n is a, c, g, or t
  misc_feature (643)..(645): n is a, c, g, or t
  misc_feature (647)..(647): n is a, c, g, or t
  misc_feature (651)..(652): n is a, c, g, or t
  misc_feature (656)..(656): n is a, c, g, or t
  misc_feature (659)..(659): n is a, c, g, or t
  misc_feature (661)..(663): n is a, c, g, or t
  misc_feature (667)..(667): n is a, c, g, or t
  misc_feature (670)..(675): n is a, c, g, or t
  misc_feature (679)..(679): n is a, c, g, or t
  misc_feature (683)..(683): n is a, c, g, or t
  misc_feature (685)..(687): n is a, c, g, or t
  misc_feature (690)..(691): n is a, c, g, or t
  misc_feature (693)..(693): n is a, c, g, or t
  misc_feature (697)..(700): n is a, c, g, or t
  misc_feature (703)..(703): n is a, c, g, or t
  misc_feature (706)..(707): n is a, c, g, or t
  misc_feature (710)..(710): n is a, c, g, or t
  misc_feature (713)..(714): n is a, c, g, or t
  misc_feature (716)..(721): n is a, c, g, or t
  misc_feature (723)..(725): n is a, c, g, or t
  misc_feature (727)..(727): n is a, c, g, or t
  misc_feature (730)..(730): n is a, c, g, or t
  misc_feature (732)..(733): n is a, c, g, or t
  misc_feature (736)..(737): n is a, c, g, or t
  misc_feature (739)..(743): n is a, c, g, or t
  misc_feature (745)..(746): n is a, c, g, or t
  misc_feature (748)..(748): n is a, c, g, or t
  misc_feature (751)..(752): n is a, c, g, or t
  misc_feature (754)..(758): n is a, c, g, or t
  misc_feature (761)..(764): n is a, c, g, or t
  misc_feature (767)..(767): n is a, c, g, or t
  misc_feature (771)..(771): n is a, c, g, or t
  misc_feature (773)..(776): n is a, c, g, or t
  misc_feature (779)..(781): n is a, c, g, or t
  misc_feature (784)..(785): n is a, c, g, or t
  misc_feature (788)..(790): n is a, c, g, or t
  misc_feature (792)..(795): n is a, c, g, or t
  misc_feature (797)..(798): n is a, c, g, or t
  misc_feature (800)..(801): n is a, c, g, or t
  misc_feature (803)..(811): n is a, c, g, or t
  misc_feature (815)..(818): n is a, c, g, or t
  misc_feature (820)..(827): n is a, c, g, or t
  misc_feature (829)..(830): n is a, c, g, or t
  misc_feature (832)..(833): n is a, c, g, or t
  misc_feature (837)..(838): n is a, c, g, or t
  misc_feature (843)..(848): n is a, c, g, or t
  misc_feature (850)..(865): n is a, c, g, or t
  misc_feature (867)..(868): n is a, c, g, or t
  misc_feature (870)..(882): n is a, c, g, or t
  misc_feature (885)..(887): n is a, c, g, or t
  misc_feature (889)..(891): n is a, c, g, or t
  misc_feature (893)..(902): n is a, c, g, or t
  misc_feature (905)..(921): n is a, c, g, or t
  misc_feature (923)..(924): n is a, c, g, or t
  misc_feature (926)..(926): n is a, c, g, or t
  misc_feature (928)..(929): n is a, c, g, or t
  misc_feature (932)..(935): n is a, c, g, or t
  misc_feature (937)..(949): n is a, c, g, or t
  misc_feature (951)..(951): n is a, c, g, or t
  misc_feature (953)..(971): n is a, c, g, or t
  misc_feature (976)..(981): n is a, c, g, or t
  misc_feature (983)..(984): n is a, c, g, or t
  misc_feature (986)..(987): n is a, c, g, or t
  misc_feature (991)..(993): n is a, c, g, or t
  misc_feature (995)..(995): n is a, c, g, or t
  misc_feature (997)..(1002): n is a, c, g, or t
  misc_feature (1004)..(1004): n is a, c, g, or t
  misc_feature (1007)..(1023): n is a, c, g, or t
  misc_feature (1025)..(1032): n is a, c, g, or t
  misc_feature (1034)..(1035): n is a, c, g, or t
  misc_feature (1037)..(1053): n is a, c, g, or t
  misc_feature (1055)..(1064): n is a, c, g, or t
  misc_feature (1066)..(1071): n is a, c, g, or t
  misc_feature (1074)..(1078): n is a, c, g, or t
  misc_feature (1080)..(1084): n is a, c, g, or t
  misc_feature (1086)..(1092): n is a, c, g, or t
  misc_feature (1095)..(1099): n is a, c, g, or t
  misc_feature (1101)..(1103): n is a, c, g, or t
  misc_feature (1105)..(1113): n is a, c, g, or t
  misc_feature (1115)..(1118): n is a, c, g, or t
  misc_feature (1121)..(1127): n is a, c, g, or t
  misc_feature (1130)..(1133): n is a, c, g, or t
  misc_feature (1135)..(1138): n is a, c, g, or t
  misc_feature (1140)..(1140): n is a, c, g, or t
  misc_feature (1143)..(1156): n is a, c, g, or t
  misc_feature (1158)..(1158): n is a, c, g, or t
  misc_feature (1160)..(1160): n is a, c, g, or t
  misc_feature (1162)..(1162): n is a, c, g, or t
  misc_feature (1165)..(1169): n is a, c, g, or t
  misc_feature (1171)..(1176): n is a, c, g, or t
  misc_feature (1180)..(1180): n is a, c, g, or t
  misc_feature (1183)..(1195): n is a, c, g, or t
  misc_feature (1197)..(1200): n is a, c, g, or t
  misc_feature (1202)..(1210): n is a, c, g, or t
  misc_feature (1212)..(1222): n is a, c, g, or t
  misc_feature (1224)..(1232): n is a, c, g, or t
  misc_feature (1234)..(1244): n is a, c, g, or t
  misc_feature (1246)..(1269): n is a, c, g, or t
  misc_feature (1271)..(1285): n is a, c, g, or t
  misc_feature (1287)..(1290): n is a, c, g, or t
  misc_feature (1292)..(1298): n is a, c, g, or t
aaaannnagganaataactatgagaggatcgcatcaccatcaccatcacggatcctatttaggtgacactatagaatcgtcgacccacgcgtccggcgccctgtcctccgtcggctctgcgggctcccgggcctacagcggcctgcggcagaaatgcccctccgggctaggagcgacggcgccggcccgctatactcgcaccacctccccacctccccgctgcagaaagcgctgttggccgccggctccgcggcgatggcgctctataacccctaccgccacgacatggtcgcagttctaggggagaccacaggacaccgcaccctgaaggtcctcagggaccanatgaggagggatccanagggtgcccagatcctgcaggagcgtccccggatttcgacatccaccctcgacctgggcaagctccanagcctgccggaaggctccctcggtcgcgagtatctccgtttcctgnatgtgaacagggtctccccanacacccgancacccacccgcttcntggatgatganganctanngnatgngattcannggtancggnaggtgnananatgcttcanaccctgntggngatgcncannannntnctgggnnanatnnngntgaantgntttgangntgnnnanatgnnctgncangnnnatcntgnnnnnnttcnttgnannnatnnanttgnnnntanaanntgnaanngnnnnnntnnnanttnanncanngnnnnntnnanaanngnnnnnaannnncangtgncnnnnaannntannaannnannnnanngnnannnnnnnnntgannnntnnnnnnnnannanntagnnattannnnnnannnnnnnnnnnnnnnngnnannnnnnnnnnnnnaannnannnannnnnnnnnnaannnnnnnnnnnnnnnnntnntntnnaannnnannnnnnnnnnnnnanannnnnnnnnnnnnnnnnnnaaaannnnnnanntnnaaannntnannnnnnanttnnnnnnnnnnnnnnnnnannnnnnnnannannnnnnnnnnnnnnnnnannnnnnnnnnannnnnnttnnnnnannnnnannnnnnnaannnnnannnannnnnnnnnannnnaannnnnnnaannnnannnnanaannnnnnnnnnnnnnanananaannnnnannnnnnaaanaannnnnnnnnnnnnannnnannnnnnnnnannnnnnnnnnnannnnnnnnnannnnnnnnnnnannnnnnnnnnnnnnnnnnnnnnnnannnnnnnnnnnnnnnannnnannnnnnn

SEQ ID NO: 119 - DNA, 1198 bp, Homo Sapiens
  misc_feature (11)..(11): n is a, c, g, or t
  misc_feature (810)..(810): n is a, c, g, or t
  misc_feature (869)..(869): n is a, c, g, or t
  misc_feature (911)..(911): n is a, c, g, or t
  misc_feature (941)..(941): n is a, c, g, or t
  misc_feature (963)..(963): n is a, c, g, or t
  misc_feature (978)..(978): n is a, c, g, or t
  misc_feature (983)..(983): n is a, c, g, or t
  misc_feature (988)..(988): n is a, c, g, or t
  misc_feature (996)..(996): n is a, c, g, or t
  misc_feature (1005)..(1005): n is a, c, g, or t
  misc_feature (1021)..(1022): n is a, c, g, or t
  misc_feature (1033)..(1033): n is a, c, g, or t
  misc_feature (1045)..(1045): n is a, c, g, or t
  misc_feature (1060)..(1060): n is a, c, g, or t
  misc_feature (1065)..(1065): n is a, c, g, or t
  misc_feature (1067)..(1067): n is a, c, g, or t
  misc_feature (1069)..(1069): n is a, c, g, or t
  misc_feature (1077)..(1077): n is a, c, g, or t
  misc_feature (1083)..(1083): n is a, c, g, or t
  misc_feature (1088)..(1088): n is a, c, g, or t
  misc_feature (1091)..(1092): n is a, c, g, or t
  misc_feature (1099)..(1099): n is a, c, g, or t
  misc_feature (1103)..(1104): n is a, c, g, or t
  misc_feature (1106)..(1106): n is a, c, g, or t
  misc_feature (1109)..(1109): n is a, c, g, or t
  misc_feature (1117)..(1120): n is a, c, g, or t
  misc_feature (1125)..(1125): n is a, c, g, or t
  misc_feature (1132)..(1132): n is a, c, g, or t
  misc_feature (1138)..(1138): n is a, c, g, or t
  misc_feature (1145)..(1145): n is a, c, g, or t
  misc_feature (1147)..(1147): n is a, c, g, or t
  misc_feature (1149)..(1149): n is a, c, g, or t
  misc_feature (1153)..(1153): n is a, c, g, or t
  misc_feature (1159)..(1160): n is a, c, g, or t
  misc_feature (1179)..(1179): n is a, c, g, or t
  misc_feature (1183)..(1185): n is a, c, g, or t
  misc_feature (1188)..(1188): n is a, c, g, or t
  misc_feature (1190)..(1190): n is a, c, g, or t
  misc_feature (1196)..(1196): n is a, c, g, or t
aatagagaaanttaactatgagaggatcgcatcaccatcaccatcacggatcctatttaggtgacactatagaatcgtcgacccacgcgtccgcgtttagaggtttgaattttctcggagaaagacaggccggccacgaggaaaacagaaacaagccgcagcaacatctaagcccttgaaaggatcctgagagaggggggaaagggaaaacagcagccaccagcccaaccacttgtgtcttctgccccttcccacctatcttgcccaccccaccagcccacgctgcttgggacttgaaatctgtggccgaaggacccccaaatggacgagggggccctggtgggggcatggttggaggtggtgggcatcgtcctcacgaaggccctggtgggggcatgggcaacagcagtggacatcgtccccacgaaggccctggcggtggcatgggaagtgggcatcgcccccatgaaggccctggtggtagcatgggtgggggtggaggacatcgtccccacgaaggccctggcggtggcatcagtggtggcagtggccatcgtccccatgaaggccctggcggaggaatgggtgctggtggtggacatcgcccccacgaaggccctggcggaagcatgggtggaagtggtggacatcgtccccatgaaggccctggacacggggggccccatggccaccggcctcatgatgtccctggtcaccgaggccatgaccatcgagggccgccacctcatgagcaccgtggccatgatggtcctggccacgggggagggggccaccgagggcacgatggangccacagccatggaggagacatgtcaaaccgccctgtctgccgacatttcatgatgaanggcaactgccgctatgaaaacaactgtgccttctaccacccngggtgtcaatgggccccccctgccctaggnaccatttgcctgccctgttcanacaacccctgtggantgcancctcnctctttcnccctgttanggcttctgtgaggccnnttttccttttncccactgaaaanaaccggccccctcantcccntngntgggttcngggggntttcnatnnggggccntgannanaantttctccnnnnggganaaaaaantgaaanttctgantntnaaanaaaccnnttgcttctttttaaaaatncccnnnccnancctttnaa

SEQ ID NO: 120 - DNA, 1373 bp, Homo Sapiens
  misc_feature (855)..(855): n is a, c, g, or t
  misc_feature (972)..(972): n is a, c, g, or t
  misc_feature (996)..(996): n is a, c, g, or t
  misc_feature (998)..(998): n is a, c, g, or t
  misc_feature (1016)..(1016): n is a, c, g, or t
  misc_feature (1022)..(1022): n is a, c, g, or t
  misc_feature (1024)..(1024): n is a, c, g, or t
  misc_feature (1027)..(1027): n is a, c, g, or t
  misc_feature (1037)..(1037): n is a, c, g, or t
  misc_feature (1063)..(1063): n is a, c, g, or t
  misc_feature (1084)..(1084): n is a, c, g, or t
  misc_feature (1087)..(1087): n is a, c, g, or t
  misc_feature (1094)..(1094): n is a, c, g, or t
  misc_feature (1100)..(1100): n is a, c, g, or t
  misc_feature (1126)..(1126): n is a, c, g, or t
  misc_feature (1128)..(1128): n is a, c, g, or t
  misc_feature (1133)..(1133): n is a, c, g, or t
  misc_feature (1136)..(1136): n is a, c, g, or t
  misc_feature (1142)..(1143): n is a, c, g, or t
  misc_feature (1148)..(1148): n is a, c, g, or t
  misc_feature (1156)..(1156): n is a, c, g, or t
  misc_feature (1162)..(1162): n is a, c, g, or t
  misc_feature (1167)..(1167): n is a, c, g, or t
  misc_feature (1175)..(1175): n is a, c, g, or t
  misc_feature (1179)..(1179): n is a, c, g, or t
  misc_feature (1183)..(1183): n is a, c, g, or t
  misc_feature (1185)..(1186): n is a, c, g, or t
  misc_feature (1189)..(1190): n is a, c, g, or t
  misc_feature (1193)..(1193): n is a, c, g, or t
  misc_feature (1195)..(1195): n is a, c, g, or t
  misc_feature (1198)..(1198): n is a, c, g, or t
  misc_feature (1200)..(1200): n is a, c, g, or t
  misc_feature (1203)..(1203): n is a, c, g, or t
  misc_feature (1212)..(1213): n is a, c, g, or t
  misc_feature (1219)..(1219): n is a, c, g, or t
  misc_feature (1243)..(1243): n is a, c, g, or t
  misc_feature (1245)..(1245): n is a, c, g, or t
  misc_feature (1252)..(1252): n is a, c, g, or t
  misc_feature (1258)..(1258): n is a, c, g, or t
  misc_feature (1262)..(1262): n is a, c, g, or t
  misc_feature (1267)..(1267): n is a, c, g, or t
  misc_feature (1274)..(1274): n is a, c, g, or t
  misc_feature (1277)..(1277): n is a, c, g, or t
  misc_feature (1285)..(1285): n is a, c, g, or t
  misc_feature (1290)..(1290): n is a, c, g, or t
  misc_feature (1295)..(1295): n is a, c, g, or t
  misc_feature (1304)..(1304): n is a, c, g, or t
  misc_feature (1310)..(1310): n is a, c, g, or t
  misc_feature (1315)..(1315): n is a, c, g, or t
  misc_feature (1327)..(1327): n is a, c, g, or t
  misc_feature (1338)..(1338): n is a, c, g, or t
  misc_feature (1344)..(1344): n is a, c, g, or t
  misc_feature (1347)..(1349): n is a, c, g, or t
  misc_feature (1352)..(1352): n is a, c, g, or t
  misc_feature (1360)..(1360): n is a, c, g, or t
  misc_feature (1372)..(1372): n is a, c, g, or t
agagaaattactatgagaggatcgcatcaccatcaccatcacggatcctatttaggtgacactatagaatcgtcgacccacgcgtccgtgaaagccacagatcaggaaaagagcagaaaactacatgaacttacggttatgcaagatagacgagaacaagcaagacaagacttgaagggtttggaagagacagtggcaaaagaacttcagactttacacaacctgcgcaaactctttgttcaggacctggctacaagagttaaaaagagtgctgagattgattctgatgacaccggaggcagcgctgctcagaagcaaaaaatctcctttcttgaaaataatcttgaacagctcactaaagtgcacaaacagttggtacgtgataatgcagatctccgctgtgaacttcctaagttggaaaagcgacttcgagctacagctgagagagtgaaagctttggaatcagcactgaaagaagctaaagaaaatgcatctcgtgatcgcaaacgctatcagcaagaagtagatcgcataaaggaagcagtcaggtcaaagaatatggccagaagagggcattctgcacagattgctaaacctattcgtcccgggcaacatccagcagcttctccaactcacccaagtgcaattcgtggaggaggtgcatttgttcagaacagccagccagtggcagtgcgaggtggaggaggcaaacaagtgtaatcgtttatacatacccacaggtgttaaaaagtaatcgaagtacgaagaggacatggtatcaagcagtcattcaatgactataacctctactcccttgggattgtagaattataacttttaaaaaaaatgtataanttatacctggcctgtacagctgtttcctacctactcttcttgtaaactctgctgcttcccaacacaactagagtgcattttggcatcttaggagggaaaaggacagtttacaactgnggccctatttattacccagtttgncnatcgggcctaaatttagncttacngngcnagctactgtncctaaaggacggacttttggattttngggaggttatttttaaccccnttnaataccnaccgcnaaaaaaaaaaaaaaaaaaaaaggggncnccccntanggggcnnataanctattacngactgncccgntgaaaccnaagncccnannccnnggntntcnanccngtgcccggnntttttngggaacccccctgggattttggcngnccaaggnaaaacnggtncccgntttccgnccnaaattggntttcntcctnctaaccccncgtttnttttnaaaaaaaaattnctttccccccncccccnttnnnggngggggtcncccccccccccnc

SEQ ID NO: 121 - DNA, 1200 bp, Homo Sapiens
  misc_feature (3)..(3): n is a, c, g, or t
  misc_feature (19)..(19): n is a, c, g, or t
  misc_feature (35)..(35): n is a, c, g, or t
  misc_feature (41)..(41): n is a, c, g, or t
  misc_feature (47)..(47): n is a, c, g, or t
  misc_feature (77)..(77): n is a, c, g, or t
  misc_feature (85)..(85): n is a, c, g, or t
  misc_feature (134)..(134): n is a, c, g, or t
  misc_feature (280)..(280): n is a, c, g, or t
  misc_feature (291)..(291): n is a, c, g, or t
  misc_feature (295)..(295): n is a, c, g, or t
  misc_feature (298)..(298): n is a, c, g, or t
  misc_feature (301)..(301): n is a, c, g, or t
  misc_feature (313)..(313): n is a, c, g, or t
  misc_feature (345)..(345): n is a, c, g, or t
  misc_feature (350)..(350): n is a, c, g, or t
  misc_feature (359)..(359): n is a, c, g, or t
  misc_feature (413)..(413): n is a, c, g, or t
  misc_feature (509)..(509): n is a, c, g, or t
  misc_feature (551)..(551): n is a, c, g, or t
  misc_feature (608)..(608): n is a, c, g, or t
  misc_feature (639)..(639): n is a, c, g, or t
  misc_feature (645)..(645): n is a, c, g, or t
  misc_feature (721)..(721): n is a, c, g, or t
  misc_feature (780)..(780): n is a, c, g, or t
  misc_feature (841)..(841): n is a, c, g, or t
  misc_feature (878)..(878): n is a, c, g, or t
  misc_feature (940)..(940): n is a, c, g, or t
  misc_feature (958)..(958): n is a, c, g, or t
  misc_feature (971)..(972): n is a, c, g, or t
  misc_feature (977)..(977): n is a, c, g, or t
  misc_feature (981)..(981): n is a, c, g, or t
  misc_feature (992)..(992): n is a, c, g, or t
  misc_feature (998)..(999): n is a, c, g, or t
  misc_feature (1001)..(1001): n is a, c, g, or t
  misc_feature (1004)..(1004): n is a, c, g, or t
  misc_feature (1016)..(1016): n is a, c, g, or t
  misc_feature (1018)..(1018): n is a, c, g, or t
  misc_feature (1022)..(1022): n is a, c, g, or t
  misc_feature (1026)..(1026): n is a, c, g, or t
  misc_feature (1030)..(1032): n is a, c, g, or t
  misc_feature (1034)..(1035): n is a, c, g, or t
  misc_feature (1037)..(1037): n is a, c, g, or t
  misc_feature (1041)..(1041): n is a, c, g, or t
  misc_feature (1047)..(1047): n is a, c, g, or t
  misc_feature (1057)..(1058): n is a, c, g, or t
  misc_feature (1060)..(1060): n is a, c, g, or t
  misc_feature (1063)..(1066): n is a, c, g, or t
  misc_feature (1069)..(1069): n is a, c, g, or t
  misc_feature (1072)..(1073): n is a, c, g, or t
  misc_feature (1088)..(1088): n is a, c, g, or t
  misc_feature (1091)..(1091): n is a, c, g, or t
  misc_feature (1094)..(1094): n is a, c, g, or t
  misc_feature (1103)..(1103): n is a, c, g, or t
  misc_feature (1108)..(1108): n is a, c, g, or t
  misc_feature (1110)..(1110): n is a, c, g, or t
  misc_feature (1117)..(1117): n is a, c, g, or t
  misc_feature (1121)..(1122): n is a, c, g, or t
  misc_feature (1124)..(1124): n is a, c, g, or t
  misc_feature (1127)..(1127): n is a, c, g, or t
  misc_feature (1132)..(1132): n is a, c, g, or t
  misc_feature (1136)..(1136): n is a, c, g, or t
  misc_feature (1147)..(1148): n is a, c, g, or t
  misc_feature (1152)..(1153): n is a, c, g, or t
  misc_feature (1161)..(1161): n is a, c, g, or t
  misc_feature (1167)..(1167): n is a, c, g, or t
  misc_feature (1171)..(1171): n is a, c, g, or t
  misc_feature (1177)..(1177): n is a, c, g, or t
  misc_feature (1179)..(1179): n is a, c, g, or t
  misc_feature (1185)..(1185): n is a, c, g, or t
  misc_feature (1189)..(1190): n is a, c, g, or t
  misc_feature (1200)..(1200): n is a, c, g, or t
aanaaatagagaaaattanttgtgagaggatcgcntcaccntcaccntcacggtatcctatttaggtgacactatanaatcgtcnacccacgcgtccgccctccagcccagcctcgcgtagctccgcctgcggnacgtgctcccgcctccgactcaaaatgcctgtctggggaggtggaaacaagtgtggggcctgtgggaggaccgtgtaccacgcaaaagaggtgcagtgtgatggcaggagcttccaccgctgctgctttctctgcatggtttgcangaaaaatttanatancanaanagtgacaattcncgatgaagagatctactgcaaatcctgctacngaaanaagtatggnccaaaaggctacggttatggccagggcgctggcacgcttaacatggaccgtggngagaggctgggcatcaaaccagagagtgttcagcctcacaggcctacaacaaatccaaacacttctaaatttgctcacaaatatggaggtgctganaagtgttccagatgtggggattctgtatatgctgccgagaanataattggagctggaaagccctggcacaaaaactgtttccgatgtgcaaagtgtggnaagagtcttgaatcaacaactctgactgaanaagaangtgaaatctattgtaaaggatgctatgcaaagaactttgggcccaagggatttggctatggccaaggagcaggggnctcttgttcatgcccagtaagatgtaaaccctgaactaaacatcacacactgagaatcncttcataatctaggccacagataatctttaacactaaactactgtgaaattctaccagccnttaagtactggtatatcgccctgtacttgggataggntgggctaactcgtaggaagaaaagcactgtaatgggtatccctttttgcttttattccccangcatttttggggggaaanattttctttttannttttnaaanaaaactttcancttggnngnaanaacacctcccanancacnaaanattnnntnntngggnggcccncctccccttnnanggnnnnccnaannaacccttaaattaancgnaancttgggacncccgntnaaaaaancccnntnatngcacnctcnaaaaatccctnntggnntttttttnaaaaancctncgtttngncccccngggnntttttttttn

SEQ ID NO: 122 - DNA, 1358 bp, Homo Sapiens
  misc_feature (704)..(704): n is a, c, g, or t
  misc_feature (739)..(739): n is a, c, g, or t
  misc_feature (750)..(750): n is a, c, g, or t
  misc_feature (788)..(788): n is a, c, g, or t
  misc_feature (799)..(799): n is a, c, g, or t
  misc_feature (819)..(819): n is a, c, g, or t
  misc_feature (833)..(833): n is a, c, g, or t
  misc_feature (846)..(846): n is a, c, g, or t
  misc_feature (848)..(848): n is a, c, g, or t
  misc_feature (859)..(859): n is a, c, g, or t
  misc_feature (863)..(863): n is a, c, g, or t
  misc_feature (881)..(881): n is a, c, g, or t
  misc_feature (906)..(907): n is a, c, g, or t
  misc_feature (910)..(910): n is a, c, g, or t
  misc_feature (918)..(918): n is a, c, g, or t
  misc_feature (935)..(935): n is a, c, g, or t
  misc_feature (937)..(937): n is a, c, g, or t
  misc_feature (951)..(951): n is a, c, g, or t
  misc_feature (954)..(955): n is a, c, g, or t
  misc_feature (969)..(970): n is a, c, g, or t
  misc_feature (972)..(972): n is a, c, g, or t
  misc_feature (975)..(975): n is a, c, g, or t
  misc_feature (987)..(987): n is a, c, g, or t
  misc_feature (1000)..(1000): n is a, c, g, or t
  misc_feature (1006)..(1007): n is a, c, g, or t
  misc_feature (1023)..(1023): n is a, c, g, or t
  misc_feature (1028)..(1028): n is a, c, g, or t
  misc_feature (1043)..(1044): n is a, c, g, or t
  misc_feature (1046)..(1046): n is a, c, g, or t
  misc_feature (1075)..(1075): n is a, c, g, or t
  misc_feature (1077)..(1077): n is a, c, g, or t
  misc_feature (1083)..(1083): n is a, c, g, or t
  misc_feature (1087)..(1087): n is a, c, g, or t
  misc_feature (1100)..(1100): n is a, c, g, or t
  misc_feature (1104)..(1104): n is a, c, g, or t
  misc_feature (1116)..(1116): n is a, c, g, or t
  misc_feature (1118)..(1118): n is a, c, g, or t
  misc_feature (1121)..(1121): n is a, c, g, or t
  misc_feature (1125)..(1125): n is a, c, g, or t
  misc_feature (1132)..(1132): n is a, c, g, or t
  misc_feature (1147)..(1147): n is a, c, g, or t
  misc_feature (1149)..(1149): n is a, c, g, or t
  misc_feature (1152)..(1152): n is a, c, g, or t
  misc_feature (1156)..(1157): n is a, c, g, or t
  misc_feature (1162)..(1162): n is a, c, g, or t
  misc_feature (1172)..(1172): n is a, c, g, or t
  misc_feature (1178)..(1178): n is a, c, g, or t
  misc_feature (1187)..(1187): n is a, c, g, or t
  misc_feature (1199)..(1199): n is a, c, g, or t
  misc_feature (1204)..(1204): n is a, c, g, or t
  misc_feature (1218)..(1219): n is a, c, g, or t
  misc_feature (1223)..(1223): n is a, c, g, or t
  misc_feature (1225)..(1225): n is a, c, g, or t
  misc_feature (1227)..(1228): n is a, c, g, or t
  misc_feature (1230)..(1230): n is a, c, g, or t
  misc_feature (1237)..(1238): n is a, c, g, or t
  misc_feature (1243)..(1243): n is a, c, g, or t
  misc_feature (1253)..(1253): n is a, c, g, or t
  misc_feature (1265)..(1266): n is a, c, g, or t
  misc_feature (1273)..(1273): n is a, c, g, or t
  misc_feature (1282)..(1283): n is a, c, g, or t
  misc_feature (1286)..(1287): n is a, c, g, or t
  misc_feature (1289)..(1289): n is a, c, g, or t
  misc_feature (1293)..(1293): n is a, c, g, or t
  misc_feature (1296)..(1296): n is a, c, g, or t
  misc_feature (1300)..(1300): n is a, c, g, or t
  misc_feature (1302)..(1302): n is a, c, g, or t
  misc_feature (1308)..(1311): n is a, c, g, or t
  misc_feature (1320)..(1321): n is a, c, g, or t
  misc_feature (1323)..(1324): n is a, c, g, or t
  misc_feature (1327)..(1327): n is a, c, g, or t
  misc_feature (1330)..(1335): n is a, c, g, or t
  misc_feature (1340)..(1342): n is a, c, g, or t
  misc_feature (1344)..(1346): n is a, c, g, or t
  misc_feature (1348)..(1351): n is a, c, g, or t
  misc_feature (1353)..(1353): n is a, c, g, or t
  misc_feature (1355)..(1357): n is a, c, g, or t
tagagaaattactatgagaggatcgcatcaccatcaccatcacggatcctatttaggtgacactatagaatcgtcgacccacgcgtccggctgcgcgcgtcggagaggctcctgggaaactcccacggcccagggactttcgaaagcagagcgaggagccctcgcacgcgctagtctgcgagtgagcgctcagcccggcacctgttcctccagcgccgccgccttcccacccctcggacccgcgccgctcgcggcgcccgcccgttcctgcgatgaatccggccctaggcaaccagacggacgtggcgggcctgttcctggccaacagcagcgaggcgctggagcgagccgtgcgctgctgcacccaggcgtccgtggtgaccgacgacggcttcgcggagggaggcccggacgagcgtagcctgtacataatgcgcgtggtgcagatcgcggtcatgtgcgtgctctcactcaccgtggtcttcggcatcttcttcctcggctgcaatctgctcatcaagtccgagggcatgatcaacttcctcgtgaaggaccggaggccgtctaaggaggtggaggcggtggtcgtggggccctactgacccgccctctgcccccgcggcaaccgctcccacgcctgcccactttgctagcccggctgtgcccctcactatcagagactgggcgaagcaaacctgtcggantcaattatttctctcgacttcggcctttcgaaaanaagcgaccggntttctccctcgccctctgaaagtcctcatgcctggcantcggaagaaancgcccaaactctgaactcancaaaaagtggcaanaaaaaggcgaatnanggcgcaaaaantttngaaactgctacttaattnggaatgcggggaaaaccaaaggtgnnaangccctttntccacccgcaagggggncnaactttttgggggnaanntgaaaaaggccggnnanggnaaaaaaacccancggcacttaattncctttnngaaccggaaaaatganccttnttaaaaacccccccnncnaaaatttttgggggttttcaaaaatccgngncggggngggntcccaattttttnctgnttcccccctggncnggnaggnaaggggnaaaaaaaaacctttnanttntaannggccnttttaaaaantttttnttttttttntttaaaaaaaanttttnaaaaattttttttnncccnangnncnttttttnnccccnaaaaaaaaantttttttttttnnaaaaaanggggggggnnggnnancccnaantttnangggggnnnnttttttttnnannttnccnnnnnnttttnnnannnannnncncnnnc

SEQ ID NO: 123 - DNA, 1299 bp, Homo Sapiens
  misc_feature (784)..(784): n is a, c, g, or t
  misc_feature (788)..(789): n is a, c, g, or t
  misc_feature (791)..(792): n is a, c, g, or t
  misc_feature (795)..(841): n is a, c, g, or t
  misc_feature (843)..(908): n is a, c, g, or t
  misc_feature (910)..(915): n is a, c, g, or t
  misc_feature (917)..(930): n is a, c, g, or t
  misc_feature (935)..(936): n is a, c, g, or t
  misc_feature (941)..(941): n is a, c, g, or t
  misc_feature (943)..(943): n is a, c, g, or t
  misc_feature (952)..(955): n is a, c, g, or t
  misc_feature (959)..(963): n is a, c, g, or t
  misc_feature (965)..(965): n is a, c, g, or t
  misc_feature (967)..(974): n is a, c, g, or t
  misc_feature (978)..(985): n is a, c, g, or t
  misc_feature (987)..(988): n is a, c, g, or t
  misc_feature (990)..(1006): n is a, c, g, or t
  misc_feature (1011)..(1016): n is a, c, g, or t
  misc_feature (1018)..(1019): n is a, c, g, or t
  misc_feature (1031)..(1032): n is a, c, g, or t
  misc_feature (1034)..(1035): n is a, c, g, or t
  misc_feature (1039)..(1040): n is a, c, g, or t
  misc_feature (1042)..(1043): n is a, c, g, or t
  misc_feature (1046)..(1048): n is a, c, g, or t
  misc_feature (1058)..(1061): n is a, c, g, or t
  misc_feature (1067)..(1067): n is a, c, g, or t
  misc_feature (1071)..(1074): n is a, c, g, or t
  misc_feature (1078)..(1079): n is a, c, g, or t
  misc_feature (1082)..(1083): n is a, c, g, or t
  misc_feature (1088)..(1101): n is a, c, g, or t
  misc_feature (1104)..(1108): n is a, c, g, or t
  misc_feature (1117)..(1118): n is a, c, g, or t
  misc_feature (1120)..(1120): n is a, c, g, or t
  misc_feature (1122)..(1123): n is a, c, g, or t
  misc_feature (1126)..(1127): n is a, c, g, or t
  misc_feature (1131)..(1131): n is a, c, g, or t
  misc_feature (1133)..(1133): n is a, c, g, or t
  misc_feature (1137)..(1139): n is a, c, g, or t
  misc_feature (1141)..(1141): n is a, c, g, or t
  misc_feature (1144)..(1144): n is a, c, g, or t
  misc_feature (1146)..(1146): n is a, c, g, or t
  misc_feature (1148)..(1153): n is a, c, g, or t
  misc_feature (1164)..(1164): n is a, c, g, or t
  misc_feature (1166)..(1169): n is a, c, g, or t
  misc_feature (1172)..(1177): n is a, c, g, or t
  misc_feature (1179)..(1188): n is a, c, g, or t
  misc_feature (1198)..(1206): n is a, c, g, or t
  misc_feature (1211)..(1216): n is a, c, g, or t
  misc_feature (1222)..(1227): n is a, c, g, or t
  misc_feature (1236)..(1240): n is a, c, g, or t
  misc_feature (1246)..(1249): n is a, c, g, or t
  misc_feature (1255)..(1256): n is a, c, g, or t
  misc_feature (1261)..(1262): n is a, c, g, or t
  misc_feature (1265)..(1266): n is a, c, g, or t
  misc_feature (1269)..(1278): n is a, c, g, or t
  misc_feature (1285)..(1290): n is a, c, g, or t
  misc_feature (1292)..(1292): n is a, c, g, or t
  misc_feature (1294)..(1299): n is a, c, g, or t
tagagaaattaactatgagaggatcgcatcaccatcaccatcacggatcctatttaggtgacactatagaatcgtcgacccacgcgtccggggagcccagctgcccaccctctggacattcacccagccaggtggtctcgtcacctcagaggctccgccagactcctgcccaggccaggactgaggcaagcctcaaggcacttctaggacctgcctcttctcaccaagatgaactcactggtttcttggcagctactgcttttcctctgtgccacccactttggggagccattagaaaaggtggcctctgtggggaattctagacccacaggccagcagctagaatccctgggcctcctggcccccggggagcagagcctgccgtgcaccgagaggaagccagctgctactgccaggctgagccgtcgggggacctcgctgtccccgccccccgagagctccgggagcccccagcagccgggcctgtccgccccccacagccgccagatccccgcaccccagggcgcggtgctggtgcagcgggagaaggacctgccgaactacaactggaactccttcggcctgcgcttcggcaagcgggaggcggcaccagggaaccacggcagaagcgctgggcggggctgagggcgcaggtgcggggcagtgaacttcagaccccaaaggagtcagagcatgcggggcgggggcggggggcggggacgtagggctaagggagggggcgctggagcttccaacccgaggcaataaaagaaatgttgcgtanctcnnannaannnnnnnnnnnnnnnnnnnnnnnnnnnnnnnnnnnnnnnnnnnnnnnannnnnnnnnnnnnnnnnnnnnnnnnnnnnnnnnnnnnnnnnnnnnnnnnnnnnnnnnnnnnnnnnnannnnnnannnnnnnnnnnnnnggggnnccccncnttaaagggnnnnaatnnnnntnannnnnnnnttgnnnnnnnntnnannnnnnnnnnnnnnnnnaaaannnnnngnntttttaaaaaanntnntttnncnnggnnntttttttttnnnnaaaaanaaannnnttgnnaannttttnnnnnnnnnnnnnntannnnnaaaaaaaanntngnnatnncccntnttannntnccnantnnnnnnaaaaaaatttngnnnnttnnnnnntnnnnnnnnnnaaaaaaaaannnnnnnnnaatannnnnnttttannnnnnaaaaaaaannnnntttttnnnntttttnnttttnnccnngannnnnnnnnnattttannnnnnanannnnnn

SEQ ID NO: 124 - DNA, 1200 bp, Homo Sapiens
  misc_feature (297)..(297): n is a, c, g, or t
  misc_feature (561)..(561): n is a, c, g, or t
  misc_feature (785)..(785): n is a, c, g, or t
  misc_feature (841)..(841): n is a, c, g, or t
  misc_feature (851)..(851): n is a, c, g, or t
  misc_feature (875)..(875): n is a, c, g, or t
  misc_feature (922)..(922): n is a, c, g, or t
  misc_feature (941)..(941): n is a, c, g, or t
  misc_feature (951)..(951): n is a, c, g, or t
  misc_feature (965)..(965): n is a, c, g, or t
  misc_feature (979)..(979): n is a, c, g, or t
  misc_feature (998)..(998): n is a, c, g, or t
  misc_feature (1015)..(1015): n is a, c, g, or t
  misc_feature (1024)..(1024): n is a, c, g, or t
  misc_feature (1026)..(1026): n is a, c, g, or t
  misc_feature (1064)..(1064): n is a, c, g, or t
  misc_feature (1080)..(1080): n is a, c, g, or t
  misc_feature (1111)..(1111): n is a, c, g, or t
  misc_feature (1115)..(1115): n is a, c, g, or t
  misc_feature (1124)..(1124): n is a, c, g, or t
  misc_feature (1131)..(1131): n is a, c, g, or t
  misc_feature (1144)..(1144): n is a, c, g, or t
  misc_feature (1150)..(1151): n is a, c, g, or t
  misc_feature (1157)..(1157): n is a, c, g, or t
  misc_feature (1159)..(1159): n is a, c, g, or t
  misc_feature (1165)..(1165): n is a, c, g, or t
  misc_feature (1167)..(1167): n is a, c, g, or t
  misc_feature (1170)..(1170): n is a, c, g, or t
  misc_feature (1180)..(1180): n is a, c, g, or t
  misc_feature (1184)..(1184): n is a, c, g, or t
tagagagattactatgagaggatcgcatcaccatcaccatcacggatcctatttaggtgacactatagaatcgtcgacccacgcgtccgcgggactcttggcgggtgaaggtgtgtgtcagcttttgcgtcactcgagccctgggcgctgcttgctaaagagccgagcacgcgggtctgtcatcatgtcgcgttacgggcggtacggaggagaaaccaaggtgtatgttggtaacctgggaactggcgctggcaaaggagagttagaaagggctttcagttattatggtcctttaanaactgtatggattgcgagaaatcctccaggatttgcctttgtggaattcgaagatcctagagatgcagaagatgcagtacgaggactggatggaaaggtgatttgtggctcccgagtgagggttgaactatcgacaggcatgcctcggagatcacgttttgatagaccacctgcccgacgtccctttgatccaaatgatagatgctatgagtgtggcgaaaagggacattatgcttatgattgtcatcgttacagccggcgaanaagaagcaggtatttattttaataaaggaatggttggtattctagttaatcaagtaattcttttattagcaaggcagaaactagtgtttttctataaacttgaatgttaattgtacaggtgtattttacaatttttgtttaattaaaaaaatgttactatattaataatcaacctggtcaaaacctttcaggtttcttcgtttgagtcagtcgccttgattcanaatgtcacgagccttatgatatcatgctgaggcgccttgcaaatccgacaattaanatcctcctanaccttgaggtgatcagcataaaangccaaatcccctcgagtcatctacacctagcttcaccttattctttnaaagggcaaaaaatttganacggtgatcnccgtaacagtaaantttggcttacaatnggggccccccctccggttnaaaaaaaagaaccccanaattgaccncntttcccactaaaaaatcttcttgcgtcaatcaagcccnccctggctcatttggntgtcatttgatccccccttaaattgaaaaancctnctaatgccncgatcgnctaaaaaacctcnaaatcnncaaatncncaaacnanggnccaaaaaggncacngcaactgcaaggttat

SEQ ID NO: 125 - DNA, 1387 bp, Homo Sapiens
  misc_feature (12)..(12): n is a, c, g, or t
  misc_feature (1042)..(1042): n is a, c, g, or t
  misc_feature (1045)..(1045): n is a, c, g, or t
  misc_feature (1065)..(1065): n is a, c, g, or t
  misc_feature (1072)..(1072): n is a, c, g, or t
  misc_feature (1089)..(1089): n is a, c, g, or t
  misc_feature (1111)..(1111): n is a, c, g, or t
  misc_feature (1123)..(1123): n is a, c, g, or t
  misc_feature (1138)..(1138): n is a, c, g, or t
  misc_feature (1142)..(1142): n is a, c, g, or t
  misc_feature (1154)..(1155): n is a, c, g, or t
  misc_feature (1162)..(1162): n is a, c, g, or t
  misc_feature (1173)..(1173): n is a, c, g, or t
  misc_feature (1177)..(1177): n is a, c, g, or t
  misc_feature (1185)..(1185): n is a, c, g, or t
  misc_feature (1191)..(1191): n is a, c, g, or t
  misc_feature (1198)..(1198): n is a, c, g, or t
  misc_feature (1203)..(1203): n is a, c, g, or t
  misc_feature (1206)..(1206): n is a, c, g, or t
  misc_feature (1209)..(1210): n is a, c, g, or t
  misc_feature (1213)..(1213): n is a, c, g, or t
  misc_feature (1236)..(1236): n is a, c, g, or t
  misc_feature (1250)..(1250): n is a, c, g, or t
  misc_feature (1257)..(1257): n is a, c, g, or t
  misc_feature (1265)..(1265): n is a, c, g, or t
  misc_feature (1268)..(1268): n is a, c, g, or t
  misc_feature (1277)..(1277): n is a, c, g, or t
  misc_feature (1281)..(1281): n is a, c, g, or t
  misc_feature (1285)..(1285): n is a, c, g, or t
  misc_feature (1287)..(1287): n is a, c, g, or t
  misc_feature (1289)..(1289): n is a, c, g, or t
  misc_feature (1292)..(1292): n is a, c, g, or t
  misc_feature (1300)..(1300): n is a, c, g, or t
  misc_feature (1310)..(1311): n is a, c, g, or t
  misc_feature (1313)..(1313): n is a, c, g, or t
  misc_feature (1317)..(1317): n is a, c, g, or t
  misc_feature (1322)..(1322): n is a, c, g, or t
  misc_feature (1324)..(1324): n is a, c, g, or t
  misc_feature (1326)..(1328): n is a, c, g, or t
  misc_feature (1336)..(1337): n is a, c, g, or t
  misc_feature (1341)..(1342): n is a, c, g, or t
  misc_feature (1346)..(1347): n is a, c, g, or t
  misc_feature (1350)..(1351): n is a, c, g, or t
  misc_feature (1356)..(1357): n is a, c, g, or t
  misc_feature (1361)..(1361): n is a, c, g, or t
  misc_feature (1363)..(1363): n is a, c, g, or t
  misc_feature (1374)..(1374): n is a, c, g, or t
  misc_feature (1381)..(1382): n is a, c, g, or t
  misc_feature (1387)..(1387): n is a, c, g, or t
tagagaaattanctatgagaggatcgcatcaccatcaccatcacggatcctatttaggtgacactatagaatcgtcgacccacgcgtccgcccactctctcgtaggcagcggcggcggcggcagcggtggggaaaagcggattccgccccctggcacacaggaatacattatgttacgacaagattccatccaatctgcggaattaaagaaaaaagagtccccctttcgtgctaagtgtcacgaaatcttctgctgcccgctgaagcaagtacaccacaaagagaacacagagccggaagagcctcagcttaagggtatagttaccaagctatacagccgacaaggctaccacttgcagctgcaggcggatggaaccattgatggcaccaaagatgaggacagcacttacactctgtttaacctcatccctgtgggtctgcgagtggtggctatccaaggagttcaaaccaagctgtacttggcaatgaacagtgagggatacttgtacacctcggaacttttcacacctgagtgcaaattcaaagaatcagtgtttgaaaattattatgtgacatattcatcaatgatataccgtcagcagcagtcaggccgagggtggtatctgggtctgaacaaagaaggagagatcatgaaaggcaaccatgtgaagaagaacaagcctgcagctcattttctgcctaaaccactgaaagtggccatgtacaaggagccatcactgcacgatctcacggagttctcccgatctggaagcgggaccccaaccaagagcagaagtgtctctggcgtgctgaacggaggcaaatccatgagccacaatgaatcaacgtagccagtgagggcaaaagaagggctctgtaacagaaccttacctccaggtgctgttgaattcttctagcagtccttcacccaaaagttcaaatttgtcagtgacatttaccaaacaaacaggcagagttcactattctatctgccattaaaccttcttatcatccatactaaagccccattatttaaattganctngtgcataaaaatgccaagcntttttantgaactaaatctgaaanaaggactgccaaattttcccangatcccccctanactttggggagaaantccnaaatatttcccnncctatgntgatcaaattngctncccccaanaaatgnaaaaacnaattnttnttnnaancaaccaaccaaccaaccaatttntgttttaatttttngcgggcnaaaaatanggnaatgggggntttngggngngnttncccccccnggaatcaagnncntttnttggnangnnntttaattnnaaanngggnnttnnttttnncccnancaaacccaatnggggaannatgtn

SEQ ID NO: 126 - DNA, 1466 bp, Homo Sapiens
  misc_feature (804)..(804): n is a, c, g, or t
  misc_feature (844)..(844): n is a, c, g, or t
  misc_feature (885)..(885): n is a, c, g, or t
  misc_feature (888)..(888): n is a, c, g, or t
  misc_feature (904)..(904): n is a, c, g, or t
  misc_feature (914)..(914): n is a, c, g, or t
  misc_feature (921)..(921): n is a, c, g, or t
  misc_feature (935)..(935): n is a, c, g, or t
  misc_feature (940)..(940): n is a, c, g, or t
  misc_feature (954)..(954): n is a, c, g, or t
  misc_feature (963)..(963): n is a, c, g, or t
  misc_feature (984)..(984): n is a, c, g, or t
  misc_feature (991)..(991): n is a, c, g, or t
  misc_feature (1006)..(1006): n is a, c, g, or t
  misc_feature (1028)..(1029): n is a, c, g, or t
  misc_feature (1033)..(1035): n is a, c, g, or t
  misc_feature (1043)..(1043): n is a, c, g, or t
  misc_feature (1045)..(1045): n is a, c, g, or t
  misc_feature (1047)..(1048): n is a, c, g, or t
  misc_feature (1050)..(1050): n is a, c, g, or t
  misc_feature (1055)..(1055): n is a, c, g, or t
  misc_feature (1060)..(1060): n is a, c, g, or t
  misc_feature (1064)..(1064): n is a, c, g, or t
  misc_feature (1070)..(1070): n is a, c, g, or t
  misc_feature (1074)..(1074): n is a, c, g, or t
  misc_feature (1079)..(1080): n is a, c, g, or t
  misc_feature (1085)..(1086): n is a, c, g, or t
  misc_feature (1095)..(1097): n is a, c, g, or t
  misc_feature (1104)..(1104): n is a, c, g, or t
  misc_feature (1112)..(1112): n is a, c, g, or t
  misc_feature (1117)..(1117): n is a, c, g, or t
  misc_feature (1120)..(1120): n is a, c, g, or t
  misc_feature (1122)..(1122): n is a, c, g, or t
  misc_feature (1130)..(1130): n is a, c, g, or t
  misc_feature (1145)..(1145): n is a, c, g, or t
  misc_feature (1149)..(1149): n is a, c, g, or t
  misc_feature (1152)..(1153): n is a, c, g, or t
  misc_feature (1157)..(1157): n is a, c, g, or t
  misc_feature (1164)..(1166): n is a, c, g, or t
  misc_feature (1174)..(1174): n is a, c, g, or t
  misc_feature (1176)..(1176): n is a, c, g, or t
  misc_feature (1183)..(1183): n is a, c, g, or t
  misc_feature (1185)..(1185): n is a, c, g, or t
  misc_feature (1187)..(1187): n is a, c, g, or t
  misc_feature (1192)..(1192): n is a, c, g, or t
  misc_feature (1199)..(1200): n is a, c, g, or t
  misc_feature (1205)..(1205): n is a, c, g, or t
  misc_feature (1207)..(1207): n is a, c, g, or t
  misc_feature (1215)..(1215): n is a, c, g, or t
  misc_feature (1218)..(1218): n is a, c, g, or t
  misc_feature (1222)..(1223): n is a, c, g, or t
  misc_feature (1225)..(1225): n is a, c, g, or t
  misc_feature (1230)..(1231): n is a, c, g, or t
  misc_feature (1233)..(1234): n is a, c, g, or t
  misc_feature (1237)..(1237): n is a, c, g, or t
  misc_feature (1239)..(1239): n is a, c, g, or t
  misc_feature (1253)..(1253): n is a, c, g, or t
  misc_feature (1257)..(1257): n is a, c, g, or t
  misc_feature (1260)..(1260): n is a, c, g, or t
  misc_feature (1263)..(1263): n is a, c, g, or t
  misc_feature (1265)..(1265): n is a, c, g, or t
  misc_feature (1271)..(1271): n is a, c, g, or t
  misc_feature (1281)..(1281): n is a, c, g, or t
  misc_feature (1289)..(1289): n is a, c, g, or t
  misc_feature (1292)..(1292): n is a, c, g, or t
  misc_feature (1306)..(1306): n is a, c, g, or t
  misc_feature (1311)..(1311): n is a, c, g, or t
  misc_feature (1314)..(1314): n is a, c, g, or t
  misc_feature (1316)..(1316): n is a, c, g, or t
  misc_feature (1326)..(1326): n is a, c, g, or t
  misc_feature (1330)..(1330): n is a, c, g, or t
  misc_feature (1337)..(1337): n is a, c, g, or t
  misc_feature (1339)..(1339): n is a, c, g, or t
  misc_feature (1350)..(1350): n is a, c, g, or t
  misc_feature (1357)..(1358): n is a, c, g, or t
  misc_feature (1361)..(1362): n is a, c, g, or t
  misc_feature (1366)..(1366): n is a, c, g, or t
  misc_feature (1375)..(1375): n is a, c, g, or t
  misc_feature (1385)..(1385): n is a, c, g, or t
  misc_feature (1389)..(1389): n is a, c, g, or t
  misc_feature (1403)..(1403): n is a, c, g, or t
  misc_feature (1413)..(1413): n is a, c, g, or t
  misc_feature (1440)..(1440): n is a, c, g, or t
  misc_feature (1447)..(1447): n is a, c, g, or t
  misc_feature (1450)..(1450): n is a, c, g, or t
  misc_feature (1462)..(1463): n is a, c, g, or t
aatagagaaattaactatgagaggatcgcatcaccatcaccattcacggatcctatttaggtgacactatagaatcgtcgacccacgcgtccgtggacattctggggaacgggctgttgaggaagaagacgctggtcccagggccgccaggttcgagccgcccggtcaagggccaggtggtcaccgtacatctgcagacgtcgctggagaatggcacacgggtgcaggaggagccggagctggtgttcactctgggtgactgtgacgtcatccaggccctggatctcagtgtcccactcatggacgtgggggagacggccatggtcactgctgactccaagtactgctacggcccccaaggcaggagcccatacatccccccgcacgcggccctgtgcctggaggtgaccctgaagacggctgtggacgggcctgacctggagatgctcacggggcaggagcgcgtggccctggccaaccggaagcgggagtgcggcaacgcccactaccagcgggcggacttcgtcctggccgccaactcctacgacctcgccatcaaggctatcacctccagcgccaaagtggacatgacgttcgaggaggaggcacagctcctgcagttgaaggtgaagtgtctgaacaacctggcggcctcgcagctgaagctcgaccactaccgcgcagccctgcgctcctgcagccttgtgctggagcaccagccagacaacatcaaggctctcttccgcaagggcaaggtgctggcccagcagggggagtacagtgaggccatccccatcctgaagncagccctgaagctggaaccttccaacaaagacgatccacncagaagctctcaaagcttggtgaaaaagcatgcggcgcaancgnaacacgaaaaccgccnttgttaccgnaaaaatnttgggcaaacccanccggntgccttgctaaatnccccttggnaagggtgcctggtccatcccnatgaaantggctgtttggggcnaatgctttttgccttggggggnntggnnntctcttgngntnntnccttnccaanaaantgaacncctnagtgnntgccnnccccttttnnnaaacaangaaacctngcctnggntncccaaatnccccaaggttccctnttanatnncctncctgggnnnggcccccncntcccggntnangaaanaagaatnngggtntnacccccanccncaannangaatnnannccntnaaaaaaaacccaangganggnccncnttcttnaaacattttncccccccnttnccccttggaaattncccgngtngncccatttctnaaanggggggngnccttccctctnatccccnnatnnaccnccccccctntcccccttanatcncccctaaaaaaaancccccctctnaaaaaaaaaaaaaataaaagcccccanagaaaanatnaatccacttaannaac

SEQ ID NO: 127 - DNA, 1200 bp, Homo Sapiens
  misc_feature (2)..(2): n is a, c, g, or t
  misc_feature (858)..(858): n is a, c, g, or t
  misc_feature (883)..(883): n is a, c, g, or t
  misc_feature (918)..(918): n is a, c, g, or t
  misc_feature (993)..(993): n is a, c, g, or t
  misc_feature (998)..(998): n is a, c, g, or t
  misc_feature (1010)..(1010): n is a, c, g, or t
  misc_feature (1017)..(1017): n is a, c, g, or t
  misc_feature (1019)..(1019): n is a, c, g, or t
  misc_feature (1023)..(1023): n is a, c, g, or t
  misc_feature (1028)..(1028): n is a, c, g, or t
  misc_feature (1036)..(1036): n is a, c, g, or t
  misc_feature (1041)..(1041): n is a, c, g, or t
  misc_feature (1056)..(1056): n is a, c, g, or t
  misc_feature (1060)..(1060): n is a, c, g, or t
  misc_feature (1071)..(1071): n is a, c, g, or t
  misc_feature (1075)..(1075): n is a, c, g, or t
  misc_feature (1079)..(1079): n is a, c, g, or t
  misc_feature (1086)..(1086): n is a, c, g, or t
  misc_feature (1096)..(1096): n is a, c, g, or t
  misc_feature (1101)..(1101): n is a, c, g, or t
  misc_feature (1112)..(1112): n is a, c, g, or t
  misc_feature (1121)..(1121): n is a, c, g, or t
  misc_feature (1124)..(1124): n is a, c, g, or t
  misc_feature (1129)..(1129): n is a, c, g, or t
  misc_feature (1142)..(1142): n is a, c, g, or t
  misc_feature (1145)..(1145): n is a, c, g, or t
  misc_feature (1154)..(1154): n is a, c, g, or t
  misc_feature (1160)..(1160): n is a, c, g, or t
  misc_feature (1167)..(1167): n is a, c, g, or t
  misc_feature (1170)..(1171): n is a, c, g, or t
  misc_feature (1179)..(1179): n is a, c, g, or t
  misc_feature (1186)..(1186): n is a, c, g, or t
  misc_feature (1193)..(1194): n is a, c, g, or t
antagagagattactatgagaggatcgcatcaccatcaccatcacggatcctatttaggtgacactatagaatcgtcgacccacgcgtccgcccacgcgtccgcgctgggcagtgtggaggtcgttggagtcacttccgcgtcaccagctcctgtgcctgccagtcggtgcccctcccgctccagccatgctctccgccctcgcccggcctgccagcgctgctctccgccgcagcttcagcacctcggcccagaacaatgctaaagtagctgtgctaggggcctctggaggcatcgggcagccactttcacttctcctgaagaacagccccttggtgagccgcctgaccctctatgatatcgcgcacacacccggagtggccgcagatctgagccacatcgagaccaaagccgctgtgaaaggctacctcggacctgaacagctgcctgactgcctgaaaggttgtgatgtggtagttattccggctggagtccccagaaagccaggcatgacccgggacgacctgttcaacaccaatgccacgattgtggccaccctgaccgctgcctgtgcccagcactgcccggaagccatgatctgcgtcattgccaatccggttaattccaccatccccatcacagcagaagttttcaagaagcatggagtgtacaaccccaacaaaatcttcggcgtgacgaccctggacatcgtcagagccaacacctttgttgcagagctgaagggtttggatccagctcgagtcaacgtccctgtcattggtggccatgctgggaagaccatcatccccctgatctctcagtgcacccccaaggtggactttccccaggaccagctganagcactcactgggcggatccaggangccggcacggaaggtggtcaaggctaaagccggancaggctctgccaccctctccatgggcgtatgccggcgcccgctttgtcttctcccttgtggatgcaatgaatggnaaagnaaggtgttgggnaatgttncnttcnttaantcccaagnaaaanggaaatgtaacctantttntcccaaaccgnttgnttgntttgggnaaaaaagggnattcnaaaaaaaaacntgggcatcnggnaaaantttcctttttttnaangaaaaaaanaatttncgaaagncannccccaaantgaaagncccccannaaaaaa

SEQ ID NO: 128 - DNA, 1425 bp, Homo Sapiens
  misc_feature (33)..(33): n is a, c, g, or t
  misc_feature (56)..(56): n is a, c, g, or t
  misc_feature (129)..(129): n is a, c, g, or t
  misc_feature (133)..(133): n is a, c, g, or t
  misc_feature (227)..(227): n is a, c, g, or t
  misc_feature (277)..(277): n is a, c, g, or t
  misc_feature (356)..(356): n is a, c, g, or t
  misc_feature (384)..(384): n is a, c, g, or t
  misc_feature (459)..(459): n is a, c, g, or t
  misc_feature (472)..(472): n is a, c, g, or t
  misc_feature (493)..(493): n is a, c, g, or t
  misc_feature (503)..(503): n is a, c, g, or t
  misc_feature (530)..(530): n is a, c, g, or t
  misc_feature (640)..(641): n is a, c, g, or t
  misc_feature (649)..(649): n is a, c, g, or t
  misc_feature (670)..(670): n is a, c, g, or t
  misc_feature (727)..(727): n is a, c, g, or t
  misc_feature (729)..(729): n is a, c, g, or t
  misc_feature (749)..(749): n is a, c, g, or t
  misc_feature (752)..(752): n is a, c, g, or t
  misc_feature (770)..(770): n is a, c, g, or t
  misc_feature (788)..(788): n is a, c, g, or t
  misc_feature (799)..(799): n is a, c, g, or t
  misc_feature (807)..(807): n is a, c, g, or t
  misc_feature (810)..(810): n is a, c, g, or t
  misc_feature (821)..(821): n is a, c, g, or t
  misc_feature (830)..(830): n is a, c, g, or t
  misc_feature (836)..(836): n is a, c, g, or t
  misc_feature (843)..(843): n is a, c, g, or t
  misc_feature (860)..(860): n is a, c, g, or t
  misc_feature (867)..(867): n is a, c, g, or t
  misc_feature (871)..(872): n is a, c, g, or t
  misc_feature (881)..(881): n is a, c, g, or t
  misc_feature (890)..(890): n is a, c, g, or t
  misc_feature (899)..(899): n is a, c, g, or t
  misc_feature (907)..(909): n is a, c, g, or t
  misc_feature (923)..(924): n is a, c, g, or t
  misc_feature (931)..(931): n is a, c, g, or t
  misc_feature (934)..(934): n is a, c, g, or t
  misc_feature (943)..(943): n is a, c, g, or t
  misc_feature (948)..(948): n is a, c, g, or t
  misc_feature (957)..(957): n is a, c, g, or t
  misc_feature (960)..(960): n is a, c, g, or t
  misc_feature (962)..(963): n is a, c, g, or t
  misc_feature (973)..(973): n is a, c, g, or t
  misc_feature (975)..(975): n is a, c, g, or t
  misc_feature (984)..(984): n is a, c, g, or t
  misc_feature (988)..(988): n is a, c, g, or t
  misc_feature (995)..(996): n is a, c, g, or t
  misc_feature (1005)..(1005): n is a, c, g, or t
  misc_feature (1008)..(1008): n is a, c, g, or t
  misc_feature (1014)..(1014): n is a, c, g, or t
  misc_feature (1021)..(1023): n is a, c, g, or t
  misc_feature (1040)..(1041): n is a, c, g, or t
  misc_feature (1043)..(1043): n is a, c, g, or t
  misc_feature (1045)..(1045): n is a, c, g, or t
  misc_feature (1048)..(1048): n is a, c, g, or t
  misc_feature (1059)..(1059): n is a, c, g, or t
  misc_feature (1063)..(1063): n is a, c, g, or t
  misc_feature (1071)..(1074): n is a, c, g, or t
  misc_feature (1076)..(1078): n is a, c, g, or t
  misc_feature (1080)..(1080): n is a, c, g, or t
  misc_feature (1088)..(1089): n is a, c, g, or t
  misc_feature (1092)..(1092): n is a, c, g, or t
  misc_feature (1096)..(1097): n is a, c, g, or t
  misc_feature (1109)..(1109): n is a, c, g, or t
  misc_feature (1115)..(1115): n is a, c, g, or t
  misc_feature (1133)..(1133): n is a, c, g, or t
  misc_feature (1135)..(1135): n is a, c, g, or t
  misc_feature (1139)..(1139): n is a, c, g, or t
  misc_feature (1142)..(1142): n is a, c, g, or t
  misc_feature (1145)..(1145): n is a, c, g, or t
  misc_feature (1159)..(1160): n is a, c, g, or t
  misc_feature (1164)..(1164): n is a, c, g, or t
  misc_feature (1171)..(1171): n is a, c, g, or t
  misc_feature (1173)..(1173): n is a, c, g, or t
  misc_feature (1183)..(1183): n is a, c, g, or t
  misc_feature (1191)..(1193): n is a, c, g, or t
  misc_feature (1196)..(1196): n is a, c, g, or t
  misc_feature (1198)..(1199): n is a, c, g, or t
  misc_feature (1208)..(1208): n is a, c, g, or t
  misc_feature (1216)..(1216): n is a, c, g, or t
  misc_feature (1218)..(1218): n is a, c, g, or t
  misc_feature (1227)..(1229): n is a, c, g, or t
  misc_feature (1233)..(1233): n is a, c, g, or t
  misc_feature (1238)..(1238): n is a, c, g, or t
  misc_feature (1247)..(1247): n is a, c, g, or t
  misc_feature (1249)..(1249): n is a, c, g, or t
  misc_feature (1251)..(1251): n is a, c, g, or t
  misc_feature (1263)..(1263): n is a, c, g, or t
  misc_feature (1279)..(1279): n is a, c, g, or t
  misc_feature (1286)..(1287): n is a, c, g, or t
  misc_feature (1298)..(1298): n is a, c, g, or t
  misc_feature (1302)..(1302): n is a, c, g, or t
  misc_feature (1314)..(1315): n is a, c, g, or t
  misc_feature (1326)..(1327): n is a, c, g, or t
  misc_feature (1331)..(1331): n is a, c, g, or t
  misc_feature (1333)..(1333): n is a, c, g, or t
  misc_feature (1342)..(1342): n is a, c, g, or t
  misc_feature (1344)..(1344): n is a, c, g, or t
  misc_feature (1347)..(1347): n is a, c, g, or t
  misc_feature (1349)..(1349): n is a, c, g, or t
  misc_feature (1367)..(1367): n is a, c, g, or t
  misc_feature (1369)..(1369): n is a, c, g, or t
  misc_feature (1371)..(1371): n is a, c, g, or t
  misc_feature (1373)..(1375): n is a, c, g, or t
  misc_feature (1391)..(1391): n is a, c, g, or t
  misc_feature (1401)..(1402): n is a, c, g, or t
  misc_feature (1418)..(1419): n is a, c, g, or t
  misc_feature (1423)..(1423): n is a, c, g, or t
  misc_feature (1425)..(1425): n is a, c, g, or t
tagagaaattactatgagaggatcgcatcaccntcaccatcacggatcctatttangtgacactatagaatcgtcgacccacgcgtccgctagttctagatcgcgagcggccctgaagcagcctccggngccncctccgccacccccgccagtgtcggcgcccgcggccgaggccgcgccccccgcctccgccgccactatcgccgcggcggcggccaccgccgtcntagccccaacctcgacggtcgccgtggccccggtcgcgtctgccttgganaagaagacaaagagcaaggggccctacatctgcgctctgtgcgccaaggagttcaagaacggctacaatctccggaggnacgaagccatccacacgggagccaaggncggccgggtcccctcgggtgctatgaagatgccgaccatggtgcccctgagcctcctgagcgtgccccagctgancggagccggcggnggagggggagaggcgggtgcnggcggcggcnctgccgcagtggccgccggtggcgtgntgaccacgaccgcctcggggaagcgcatccggaagaaccatgcctgcgagatgtgtggcaaggccttccgcgacgtctaccacctgaaccgacacaagctgtcgcactcnnacgaaaanccctaccagtgcccggtgtgncagcagcgcttcaagcgcaaggaccgcatgagctaccacgtgcgctcacatgacggngntgtgcaaaaagccctacaantgntcccactgtggcaagagnttctcccggccggatcanctcaacagtcncgtcaaanatntgcaactcaanagaaacggncccttnaaatgtnaaaaaatgtgaaggtancttttcnccannaaaggattngtttgcggncgcaccccntttacgannncgaagaaaaaagtnnccatgtnacntgttgttgncaaanatgcttaanctngnntttatatttncngaacacatnaaangggttcnncccggggtnctnacccangttttgnnnacttctgcaaaaaaagnnantnganaagattttttntaanggcaaatnnnntnnntntcggtgtnnaantttnnaatacgtcaaanaaatanaacccctccccacatttntngttnctnttnggggagaaggggtnnctgnaaatttnanccttttcctncaaacctnnnaantnnaaatttttncggggaanangaaaaagtnnnaaanccttntttaacttntntnccccttttttcntaaatttaatttctcnctaaaannttccttaaaanaaanaaaaaaattttnnttaaaatcctnntttnanaaatttttncnacncnttaaaaaaagacacatanantncnnntagtaataaatccttnacaggggagnnaaaaaaaaaaatattnnatcncn

SEQ ID NO: 129 - DNA, 1466 bp, Homo Sapiens
  misc_feature (433)..(433): n is a, c, g, or t
  misc_feature (501)..(501): n is a, c, g, or t
  misc_feature (538)..(539): n is a, c, g, or t
  misc_feature (550)..(550): n is a, c, g, or t
  misc_feature (552)..(553): n is a, c, g, or t
  misc_feature (556)..(556): n is a, c, g, or t
  misc_feature (563)..(564): n is a, c, g, or t
  misc_feature (568)..(569): n is a, c, g, or t
  misc_feature (571)..(571): n is a, c, g, or t
  misc_feature (581)..(581): n is a, c, g, or t
  misc_feature (590)..(590): n is a, c, g, or t
  misc_feature (592)..(592): n is a, c, g, or t
  misc_feature (597)..(598): n is a, c, g, or t
  misc_feature (600)..(601): n is a, c, g, or t
  misc_feature (604)..(604): n is a, c, g, or t
  misc_feature (610)..(611): n is a, c, g, or t
  misc_feature (613)..(613): n is a, c, g, or t
  misc_feature (615)..(615): n is a, c, g, or t
  misc_feature (621)..(621): n is a, c, g, or t
  misc_feature (624)..(625): n is a, c, g, or t
  misc_feature (627)..(627): n is a, c, g, or t
  misc_feature (629)..(629): n is a, c, g, or t
  misc_feature (631)..(631): n is a, c, g, or t
  misc_feature (633)..(633): n is a, c, g, or t
  misc_feature (639)..(639): n is a, c, g, or t
  misc_feature (642)..(642): n is a, c, g, or t
  misc_feature (645)..(645): n is a, c, g, or t
  misc_feature (650)..(651): n is a, c, g, or t
  misc_feature (657)..(657): n is a, c, g, or t
  misc_feature (662)..(662): n is a, c, g, or t
  misc_feature (669)..(669): n is a, c, g, or t
  misc_feature (671)..(671): n is a, c, g, or t
  misc_feature (675)..(675): n is a, c, g, or t
  misc_feature (679)..(680): n is a, c, g, or t
  misc_feature (683)..(683): n is a, c, g, or t
  misc_feature (685)..(685): n is a, c, g, or t
  misc_feature (689)..(689): n is a, c, g, or t
  misc_feature (692)..(693): n is a, c, g, or t
  misc_feature (695)..(696): n is a, c, g, or t
  misc_feature (698)..(699): n is a, c, g, or t
  misc_feature (701)..(701): n is a, c, g, or t
  misc_feature (705)..(705): n is a, c, g, or t
  misc_feature (708)..(708): n is a, c, g, or t
  misc_feature (710)..(711): n is a, c, g, or t
  misc_feature (713)..(713): n is a, c, g, or t
  misc_feature (715)..(718): n is a, c, g, or t
  misc_feature (723)..(726): n is a, c, g, or t
  misc_feature (735)..(735): n is a, c, g, or t
  misc_feature (737)..(738): n is a, c, g, or t
  misc_feature (742)..(742): n is a, c, g, or t
  misc_feature (749)..(749): n is a, c, g, or t
  misc_feature (754)..(755): n is a, c, g, or t
  misc_feature (761)..(762): n is a, c, g, or t
  misc_feature (765)..(765): n is a, c, g, or t
  misc_feature (767)..(767): n is a, c, g, or t
  misc_feature (769)..(769): n is a, c, g, or t
  misc_feature (771)..(771): n is a, c, g, or t
  misc_feature (775)..(775): n is a, c, g, or t
  misc_feature (777)..(778): n is a, c, g, or t
  misc_feature (780)..(780): n is a, c, g, or t
  misc_feature (784)..(785): n is a, c, g, or t
  misc_feature (787)..(787): n is a, c, g, or t
  misc_feature (792)..(793): n is a, c, g, or t
  misc_feature (798)..(799): n is a, c, g, or t
  misc_feature (808)..(808): n is a, c, g, or t
  misc_feature (812)..(812): n is a, c, g, or t
  misc_feature (816)..(816): n is a, c, g, or t
  misc_feature (820)..(820): n is a, c, g, or t
  misc_feature (822)..(822): n is a, c, g, or t
  misc_feature (824)..(825): n is a, c, g, or t
  misc_feature (828)..(828): n is a, c, g, or t
  misc_feature (832)..(832): n is a, c, g, or t
  misc_feature (834)..(834): n is a, c, g, or t
  misc_feature (840)..(841): n is a, c, g, or t
  misc_feature (843)..(843): n is a, c, g, or t
  misc_feature (845)..(845): n is a, c, g, or t
  misc_feature (848)..(848): n is a, c, g, or t
  misc_feature (860)..(860): n is a, c, g, or t
  misc_feature (864)..(864): n is a, c, g, or t
  misc_feature (868)..(868): n is a, c, g, or t
  misc_feature (872)..(872): n is a, c, g, or t
  misc_feature (877)..(877): n is a, c, g, or t
  misc_feature (886)..(887): n is a, c, g, or t
  misc_feature (891)..(893): n is a, c, g, or t
  misc_feature (895)..(895): n is a, c, g, or t
  misc_feature (898)..(898): n is a, c, g, or t
  misc_feature (903)..(904): n is a, c, g, or t
  misc_feature (911)..(912): n is a, c, g, or t
  misc_feature (916)..(916): n is a, c, g, or t
  misc_feature (923)..(923): n is a, c, g, or t
  misc_feature (928)..(928): n is a, c, g, or t
  misc_feature (933)..(934): n is a, c, g, or t
  misc_feature (936)..(936): n is a, c, g, or t
  misc_feature (938)..(939): n is a, c, g, or t
  misc_feature (941)..(941): n is a, c, g, or t
  misc_feature (944)..(946): n is a, c, g, or t
  misc_feature (948)..(950): n is a, c, g, or t
  misc_feature (955)..(955): n is a, c, g, or t
  misc_feature (964)..(965): n is a, c, g, or t
  misc_feature (967)..(967): n is a, c, g, or t
  misc_feature (972)..(972): n is a, c, g, or t
  misc_feature (979)..(979): n is a, c, g, or t
  misc_feature (981)..(981): n is a, c, g, or t
  misc_feature (985)..(986): n is a, c, g, or t
  misc_feature (988)..(988): n is a, c, g, or t
  misc_feature (996)..(997): n is a, c, g, or t
  misc_feature (1001)..(1001): n is a, c, g, or t
  misc_feature (1003)..(1003): n is a, c, g, or t
  misc_feature (1006)..(1006): n is a, c, g, or t
  misc_feature (1008)..(1008): n is a, c, g, or t
  misc_feature (1011)..(1012): n is a, c, g, or t
  misc_feature (1019)..(1019): n is a, c, g, or t
  misc_feature (1022)..(1023): n is a, c, g, or t
  misc_feature (1028)..(1028): n is a, c, g, or t
  misc_feature (1030)..(1030): n is a, c, g, or t
  misc_feature (1037)..(1037): n is a, c, g, or t
  misc_feature (1044)..(1044): n is a, c, g, or t
  misc_feature (1047)..(1047): n is a, c, g, or t
  misc_feature (1049)..(1049): n is a, c, g, or t
  misc_feature (1054)..(1055): n is a, c, g, or t
  misc_feature (1069)..(1069): n is a, c, g, or t
  misc_feature (1081)..(1081): n is a, c, g, or t
  misc_feature (1083)..(1083): n is a, c, g, or t
  misc_feature (1086)..(1086): n is a, c, g, or t
  misc_feature (1091)..(1091): n is a, c, g, or t
  misc_feature (1093)..(1093): n is a, c, g, or t
  misc_feature (1096)..(1097): n is a, c, g, or t
  misc_feature (1099)..(1099): n is a, c, g, or t
  misc_feature (1101)..(1101): n is a, c, g, or t
  misc_feature (1108)..(1108): n is a, c, g, or t
  misc_feature (1110)..(1110): n is a, c, g, or t
  misc_feature (1113)..(1115): n is a, c, g, or t
  misc_feature (1117)..(1117): n is a, c, g, or t
  misc_feature (1120)..(1120): n is a, c, g, or t
  misc_feature (1127)..(1128): n is a, c, g, or t
  misc_feature (1133)..(1133): n is a, c, g, or t
  misc_feature (1137)..(1137): n is a, c, g, or t
  misc_feature (1148)..(1148): n is a, c, g, or t
  misc_feature (1155)..(1155): n is a, c, g, or t
  misc_feature (1161)..(1161): n is a, c, g, or t
  misc_feature (1163)..(1164): n is a, c, g, or t
  misc_feature (1167)..(1167): n is a, c, g, or t
  misc_feature (1176)..(1177): n is a, c, g, or t
  misc_feature (1187)..(1188): n is a, c, g, or t
  misc_feature (1192)..(1192): n is a, c, g, or t
  misc_feature (1196)..(1203): n is a, c, g, or t
  misc_feature (1206)..(1206): n is a, c, g, or t
  misc_feature (1209)..(1209): n is a, c, g, or t
  misc_feature (1216)..(1218): n is a, c, g, or t
  misc_feature (1221)..(1221): n is a, c, g, or t
  misc_feature (1225)..(1225): n is a, c, g, or t
  misc_feature (1227)..(1228): n is a, c, g, or t
  misc_feature (1234)..(1234): n is a, c, g, or t
  misc_feature (1237)..(1238): n is a, c, g, or t
  misc_feature (1241)..(1241): n is a, c, g, or t
  misc_feature (1244)..(1245): n is a, c, g, or t
  misc_feature (1249)..(1249): n is a, c, g, or t
  misc_feature (1253)..(1253): n is a, c, g, or t
  misc_feature (1260)..(1260): n is a, c, g, or t
  misc_feature (1263)..(1263): n is a, c, g, or t
  misc_feature (1265)..(1265): n is a, c, g, or t
  misc_feature (1267)..(1268): n is a, c, g, or t
  misc_feature (1272)..(1272): n is a, c, g, or t
  misc_feature (1278)..(1278): n is a, c, g, or t
  misc_feature (1280)..(1280): n is a, c, g, or t
  misc_feature (1287)..(1287): n is a, c, g, or t
  misc_feature (1289)..(1289): n is a, c, g, or t
  misc_feature (1291)..(1292): n is a, c, g, or t
  misc_feature (1294)..(1295): n is a, c, g, or t
  misc_feature (1300)..(1300): n is a, c, g, or t
  misc_feature (1302)..(1302): n is a, c, g, or t
  misc_feature (1306)..(1306): n is a, c, g, or t
  misc_feature (1308)..(1308): n is a, c, g, or t
  misc_feature (1310)..(1310): n is a, c, g, or t
  misc_feature (1312)..(1313): n is a, c, g, or t
  misc_feature (1317)..(1318): n is a, c, g, or t
  misc_feature (1321)..(1321): n is a, c, g, or t
  misc_feature (1332)..(1333): n is a, c, g, or t
  misc_feature (1335)..(1335): n is a, c, g, or t
  misc_feature (1337)..(1337): n is a, c, g, or t
  misc_feature (1342)..(1342): n is a, c, g, or t
  misc_feature (1345)..(1345): n is a, c, g, or t
  misc_feature (1348)..(1348): n is a, c, g, or t
  misc_feature (1352)..(1352): n is a, c, g, or t
  misc_feature (1355)..(1355): n is a, c, g, or t
  misc_feature (1358)..(1358): n is a, c, g, or t
  misc_feature (1361)..(1361): n is a, c, g, or t
  misc_feature (1366)..(1367): n is a, c, g, or t
  misc_feature (1380)..(1380): n is a, c, g, or t
  misc_feature (1382)..(1383): n is a, c, g, or t
  misc_feature (1400)..(1400): n is a, c, g, or t
  misc_feature (1408)..(1409): n is a, c, g, or t
  misc_feature (1415)..(1417): n is a, c, g, or t
  misc_feature (1419)..(1421): n is a, c, g, or t
  misc_feature (1425)..(1425): n is a, c, g, or t
  misc_feature (1432)..(1432): n is a, c, g, or t
  misc_feature (1440)..(1440): n is a, c, g, or t
  misc_feature (1445)..(1445): n is a, c, g, or t
  misc_feature (1451)..(1452): n is a, c, g, or t
  misc_feature (1456)..(1456): n is a, c, g, or t
  misc_feature (1458)..(1458): n is a, c, g, or t
  misc_feature (1460)..(1460): n is a, c, g, or t
  misc_feature (1462)..(1463): n is a, c, g, or t
  misc_feature (1465)..(1466): n is a, c, g, or t
tagagagattactatgagaggatcgcatcaccatcaccatcacggatcctatttaggtgacactatagaatcgtcgacccacgcgtccgcgggacgcgcttggccttgcccgcgcccgctcgcctcgtctcgcccggcctccccgcgtcgcctcgtcgcctgttccgcgccaggcatggcccccagcactgtggccgtggagctgctcagccccaaagagaaaaaccgactgcggaagccggtggtggagaagatgcgccgcgaccgcatcaacagcagcatcgagcagctgaagctgctgctggagcaggagttcgcgcggcaccagcccaactccaagctggagaaggccgacatcctggagatggctgtcagctacctgaagcacagcaaagccttcgtcgccgccgccggccccaagagcctgcaccangactacagcgaaggctactcgtggtgcctgcaggaggccgtgcagttcctgacgctccacgccgccancgacacgcaaatgaagctgctgtaccacttccagtgnnctccggccgcncnngcngtgcccnncaannancccaaggcancaggcgccncntcccnncnnacntctctnntncnaagctnttnntngnancngacgangcnaancaaanntaatancggtntctggcntncctnactnnttnangaanaanntnnannantgtnggncnnantnnnnaaaannnnagaatcctncnncctnttcaatngtagnnatatannttntntnangttntnntncccnnanattannaaaanntcttttctncctnaagntctnananncanattnanatgatnnananaanaaacccattcancganaatnatantacanaatttcccnnatcnnnantantaatnnttatgannaatnctttttntttantttannancnnanctnnntnnntttancttttaaannanttttnaaaaaanantttnntngaaatatnntcantncananttnnttcaaanaanntttanantacaagntttattnaanantaatnntctcttattttaanaaattttcttcnanatnccaantnttnnananatattcncnatnnntnatnttttaanncaaantatntttattttttntcaaatnaaattnannatnttattttcnnttaaaaatannctcntttnnnnnnnntanatnactttannnaanattnannaaattnttnnaantgnntacnatantaatttnacntntnnactntatttntnatttatnananncnntattntnaaanantntnnattnnaanattttattttnntnantaatnaantanactnttnctnctnaacgnntttcttaaagacnanntaattatatcttcaatnacaaaatnntattannncnnntaanataatanatttatanatctntatcannatantnantnntnn

SEQ ID NO: 130 - DNA, 1303 bp, Homo Sapiens
  misc_feature (3)..(3): n is a, c, g, or t
  misc_feature (582)..(582): n is a, c, g, or t
  misc_feature (670)..(670): n is a, c, g, or t
  misc_feature (703)..(703): n is a, c, g, or t
  misc_feature (721)..(721): n is a, c, g, or t
  misc_feature (739)..(739): n is a, c, g, or t
  misc_feature (749)..(750): n is a, c, g, or t
  misc_feature (779)..(779): n is a, c, g, or t
  misc_feature (783)..(783): n is a, c, g, or t
  misc_feature (794)..(794): n is a, c, g, or t
  misc_feature (813)..(813): n is a, c, g, or t
  misc_feature (817)..(817): n is a, c, g, or t
  misc_feature (824)..(824): n is a, c, g, or t
  misc_feature (829)..(829): n is a, c, g, or t
  misc_feature (832)..(832): n is a, c, g, or t
  misc_feature (834)..(834): n is a, c, g, or t
  misc_feature (840)..(840): n is a, c, g, or t
  misc_feature (842)..(842): n is a, c, g, or t
  misc_feature (847)..(847): n is a, c, g, or t
  misc_feature (856)..(857): n is a, c, g, or t
  misc_feature (863)..(863): n is a, c, g, or t
  misc_feature (871)..(872): n is a, c, g, or t
  misc_feature (876)..(876): n is a, c, g, or t
  misc_feature (880)..(880): n is a, c, g, or t
  misc_feature (884)..(884): n is a, c, g, or t
  misc_feature (894)..(894): n is a, c, g, or t
  misc_feature (898)..(898): n is a, c, g, or t
  misc_feature (901)..(901): n is a, c, g, or t
  misc_feature (904)..(904): n is a, c, g, or t
  misc_feature (907)..(907): n is a, c, g, or t
  misc_feature (909)..(909): n is a, c, g, or t
  misc_feature (913)..(913): n is a, c, g, or t
  misc_feature (918)..(918): n is a, c, g, or t
  misc_feature (924)..(924): n is a, c, g, or t
  misc_feature (926)..(927): n is a, c, g, or t
  misc_feature (934)..(934): n is a, c, g, or t
  misc_feature (936)..(936): n is a, c, g, or t
  misc_feature (942)..(942): n is a, c, g, or t
  misc_feature (948)..(952): n is a, c, g, or t
  misc_feature (957)..(958): n is a, c, g, or t
  misc_feature (971)..(971): n is a, c, g, or t
  misc_feature (973)..(974): n is a, c, g, or t
  misc_feature (981)..(981): n is a, c, g, or t
  misc_feature (997)..(997): n is a, c, g, or t
  misc_feature (1002)..(1003): n is a, c, g, or t
  misc_feature (1011)..(1013): n is a, c, g, or t
  misc_feature (1015)..(1015): n is a, c, g, or t
  misc_feature (1017)..(1018): n is a, c, g, or t
  misc_feature (1020)..(1021): n is a, c, g, or t
  misc_feature (1024)..(1024): n is a, c, g, or t
  misc_feature (1029)..(1031): n is a, c, g, or t
  misc_feature (1037)..(1041): n is a, c, g, or t
  misc_feature (1051)..(1051): n is a, c, g, or t
  misc_feature (1053)..(1053): n is a, c, g, or t
  misc_feature (1057)..(1057): n is a, c, g, or t
  misc_feature (1060)..(1062): n is a, c, g, or t
  misc_feature (1067)..(1067): n is a, c, g, or t
  misc_feature (1070)..(1071): n is a, c, g, or t
  misc_feature (1074)..(1074): n is a, c, g, or t
  misc_feature (1077)..(1077): n is a, c, g, or t
  misc_feature (1079)..(1081): n is a, c, g, or t
  misc_feature (1086)..(1086): n is a, c, g, or t
  misc_feature (1088)..(1090): n is a, c, g, or t
  misc_feature (1092)..(1092): n is a, c, g, or t
  misc_feature (1095)..(1095): n is a, c, g, or t
  misc_feature (1099)..(1099): n is a, c, g, or t
  misc_feature (1101)..(1101): n is a, c, g, or t
  misc_feature (1104)..(1104): n is a, c, g, or t
  misc_feature (1109)..(1109): n is a, c, g, or t
  misc_feature (1113)..(1113): n is a, c, g, or t
  misc_feature (1117)..(1117): n is a, c, g, or t
  misc_feature (1119)..(1120): n is a, c, g, or t
  misc_feature (1126)..(1126): n is a, c, g, or t
  misc_feature (1129)..(1131): n is a, c, g, or t
  misc_feature (1135)..(1135): n is a, c, g, or t
  misc_feature (1140)..(1140): n is a, c, g, or t
  misc_feature (1142)..(1142): n is a, c, g, or t
  misc_feature (1147)..(1155): n is a, c, g, or t
  misc_feature (1157)..(1157): n is a, c, g, or t
  misc_feature (1164)..(1165): n is a, c, g, or t
  misc_feature (1173)..(1173): n is a, c, g, or t
  misc_feature (1176)..(1176): n is a, c, g, or t
  misc_feature (1179)..(1179): n is a, c, g, or t
  misc_feature (1182)..(1182): n is a, c, g, or t
  misc_feature (1186)..(1186): n is a, c, g, or t
  misc_feature (1188)..(1192): n is a, c, g, or t
  misc_feature (1194)..(1194): n is a, c, g, or t
  misc_feature (1197)..(1197): n is a, c, g, or t
  misc_feature (1200)..(1200): n is a, c, g, or t
  misc_feature (1204)..(1204): n is a, c, g, or t
  misc_feature (1207)..(1209): n is a, c, g, or t
  misc_feature (1211)..(1211): n is a, c, g, or t
  misc_feature (1215)..(1215): n is a, c, g, or t
  misc_feature (1218)..(1229): n is a, c, g, or t
  misc_feature (1234)..(1234): n is a, c, g, or t
  misc_feature (1239)..(1239): n is a, c, g, or t
  misc_feature (1241)..(1244): n is a, c, g, or t
  misc_feature (1246)..(1247): n is a, c, g, or t
  misc_feature (1249)..(1251): n is a, c, g, or t
  misc_feature (1253)..(1253): n is a, c, g, or t
  misc_feature (1255)..(1259): n is a, c, g, or t
  misc_feature (1261)..(1261): n is a, c, g, or t
  misc_feature (1263)..(1265): n is a, c, g, or t
  misc_feature (1268)..(1268): n is a, c, g, or t
  misc_feature (1273)..(1273): n is a, c, g, or t
  misc_feature (1276)..(1276): n is a, c, g, or t
  misc_feature (1280)..(1280): n is a, c, g, or t
  misc_feature (1282)..(1283): n is a, c, g, or t
  misc_feature (1285)..(1287): n is a, c, g, or t
  misc_feature (1290)..(1291): n is a, c, g, or t
  misc_feature (1293)..(1297): n is a, c, g, or t
atntagagaaattactatgagaggatcgcatcaccatcaccatcacggatcctatttaggtgacactatagaatcgtcgacccacgcgtccggcgcggcggctgctggagccgggggcggcggagccagccgagcgcggcgcggagccggaggcgggcgcggagccggcgggggccgaggtggctgggcccggggccgcagcggcgggggcagtcggggctccggtgcccgtggattgctcggacgaggcgggcaacaccgcactgcagttcgccgcggccgggggccacgaaccgctggtgcgcttcctgctgcgccgcggtgcctcggtcaacagccgcaaccactacggctggagcgcgctcatgcaggcggccagatgaggagaaaaggcgacctgatattttccatgcattgaaaatgggaaacttccagctggtcaaagagattgccgatgaagaccccagccacgtgaacttggtcaatggggacggggcgacgccactgatgctagcagctgttacggggcagctggctctggtgcagctgctggtggagaggcacgcggatgttgacaagcangacagcgtgcatggctggacggccctcatgcaggcaacctaccatggacacggaacttgttcgactgctggcatctgtctgcatgcangtgaataaagacaaaggccggccgagccaccancctcccctgccccactcnaaggtccgacagccctgnagcatcccanntgctgcccgatgacaagggtggaatgaanttcntggtggaaccnaatgtccaaatcggttccnaaanctcaaantgatncananctgccncntgggnttgtccaannaaccanccttttgnntttntttnaacnaaccctaaanccanctnttngantncaanaaatnaaaggntnnccccccnanaaaaanaaaaannnnnttctnnaattccttaaatngnnccccttntgaaccaaaaaaaaanggttnnttgggtannntnannannaanaaaannnaaaaannnnntttttttaanantccnttnnnaaaanttnnaanaanannnaaaangnnntnccntttngnaantttanattncctntnnaaaaanaannntttntaaancntaaannnnnnnnncncctttannaaaaaggnaanaanttnaaanannnnnanttnttntttnttnnntntccnatnnnnnnnnnnnnaaaanattgngnnnntnntnnntntnnnnncntnnnaanaaaanaantaantnntnnnaanntnnnnntaaaat

SEQ ID NO: 131 - DNA, 1351 bp, Homo Sapiens
  misc_feature (811)..(811): n is a, c, g, or t
  misc_feature (819)..(819): n is a, c, g, or t
  misc_feature (856)..(856): n is a, c, g, or t
  misc_feature (881)..(881): n is a, c, g, or t
  misc_feature (884)..(884): n is a, c, g, or t
  misc_feature (914)..(914): n is a, c, g, or t
  misc_feature (916)..(916): n is a, c, g, or t
  misc_feature (936)..(936): n is a, c, g, or t
  misc_feature (940)..(940): n is a, c, g, or t
  misc_feature (944)..(944): n is a, c, g, or t
  misc_feature (978)..(978): n is a, c, g, or t
  misc_feature (980)..(980): n is a, c, g, or t
  misc_feature (982)..(982): n is a, c, g, or t
  misc_feature (984)..(984): n is a, c, g, or t
  misc_feature (987)..(989): n is a, c, g, or t
  misc_feature (993)..(993): n is a, c, g, or t
  misc_feature (996)..(998): n is a, c, g, or t
  misc_feature (1007)..(1007): n is a, c, g, or t
  misc_feature (1012)..(1012): n is a, c, g, or t
  misc_feature (1018)..(1018): n is a, c, g, or t
  misc_feature (1021)..(1021): n is a, c, g, or t
  misc_feature (1033)..(1034): n is a, c, g, or t
  misc_feature (1041)..(1041): n is a, c, g, or t
  misc_feature (1048)..(1049): n is a, c, g, or t
  misc_feature (1051)..(1052): n is a, c, g, or t
  misc_feature (1055)..(1056): n is a, c, g, or t
  misc_feature (1059)..(1059): n is a, c, g, or t
  misc_feature (1062)..(1063): n is a, c, g, or t
  misc_feature (1068)..(1069): n is a, c, g, or t
  misc_feature (1072)..(1073): n is a, c, g, or t
  misc_feature (1076)..(1077): n is a, c, g, or t
  misc_feature (1079)..(1079): n is a, c, g, or t
  misc_feature (1085)..(1085): n is a, c, g, or t
  misc_feature (1089)..(1089): n is a, c, g, or t
  misc_feature (1091)..(1094): n is a, c, g, or t
  misc_feature (1099)..(1102): n is a, c, g, or t
  misc_feature (1105)..(1105): n is a, c, g, or t
  misc_feature (1107)..(1107): n is a, c, g, or t
  misc_feature (1111)..(1112): n is a, c, g, or t
  misc_feature (1115)..(1125): n is a, c, g, or t
  misc_feature (1129)..(1132): n is a, c, g, or t
  misc_feature (1135)..(1135): n is a, c, g, or t
  misc_feature (1138)..(1138): n is a, c, g, or t
  misc_feature (1141)..(1142): n is a, c, g, or t
  misc_feature (1145)..(1146): n is a, c, g, or t
  misc_feature (1150)..(1151): n is a, c, g, or t
  misc_feature (1159)..(1171): n is a, c, g, or t
  misc_feature (1175)..(1175): n is a, c, g, or t
  misc_feature (1177)..(1181): n is a, c, g, or t
  misc_feature (1183)..(1183): n is a, c, g, or t
  misc_feature (1185)..(1190): n is a, c, g, or t
  misc_feature (1192)..(1197): n is a, c, g, or t
  misc_feature (1202)..(1217): n is a, c, g, or t
  misc_feature (1219)..(1276): n is a, c, g, or t
  misc_feature (1278)..(1309): n is a, c, g, or t
  misc_feature (1311)..(1351): n is a, c, g, or t
aaattagagaaattactatgagaggatcgcatcaccatcaccatcacggatcctatttaggtgacactatagaatcgtcgacccacgcgtccgagcgcacccacactggcgagcggccctacaaatgtccccgttgcggcaaggccttcgccgacagctcttacctgcttcgccaccagcgcactcactctggccagaagccctacaagtgcccacattgtggcaaggccttcggcgacagctcctacctcctgcgacaccagcgcacccacagccacgagcggccctacagctgcaccgagtgcggcaagtgctatagccagaactcgtccctgcgcagccatcagagggtgcacaccggtcagaggcccttcagctgtggcatctgcggcaagagcttctcccagcggtcggcccttatcccccatgcccgcagccacgcccgggagaagcccttcaagtgccctgagtgcggcaagcgctttggccagagctcggtgctggccatccacgcccgcacccacctgccaggccgcacctacagctgccccgactgcggcaagaccttcaatcgctcctccactctcatccagcaccagcgctcccacacgggcgagcggccctacaggtgcgccgtgtgcggcaagggcttctgccgctcctccacgcttctgcagcatcaccgggtccacagtggcgagcggccttacaagtgcgatgactgcggaaaggccttctcccagagctccgacctcatccgccaccagcggacccacgcggcggggccggcgctgacctggggccccagcangggtgggnaggtgtgggcaaaaaaataaggggccagggaagctanaggaactttagggaggatagtgganaanccccaggaaaatggagaactgaggatgctngnaaaaaaaaaacaaggtggangaantgantgccctggaaaacttgtgggaattgggttggaangnangncannncggnaannnggaaggccntgggnaaaaanggnaaaaaaagtcanngaagggnttggccnnannccnnggnttnnttggnnggnngcnngntttggnaaantnnnnaaaannnnggnangggnnaannnnnnnnnnnttannnnaanttnaannggnnttanntttaaatnnnnnnnnnnnnnaaantnnnnntnannnnnnannnnnnaaaannnnnnnnnnnnnnnnannnnnnnnnnnnnnnnnnnnnnnnnnnnnnnnnnnnnnnnnnnnnnnnnnnnnnnnnntnnnnnnnnnnnnnnnnnnnnnnnnnnnnnnnntnnnnnnnnnnnnnnnnnnnnnnnnnnnnnnnnnnnnnnnnn

SEQ ID NO: 132 - DNA, 1370 bp, Homo Sapiens
  misc_feature (1)..(1): n is a, c, g, or t
  misc_feature (898)..(898): n is a, c, g, or t
  misc_feature (923)..(923): n is a, c, g, or t
  misc_feature (979)..(979): n is a, c, g, or t
  misc_feature (994)..(994): n is a, c, g, or t
  misc_feature (1016)..(1016): n is a, c, g, or t
  misc_feature (1019)..(1019): n is a, c, g, or t
  misc_feature (1021)..(1021): n is a, c, g, or t
  misc_feature (1028)..(1028): n is a, c, g, or t
  misc_feature (1031)..(1031): n is a, c, g, or t
  misc_feature (1045)..(1045): n is a, c, g, or t
  misc_feature (1052)..(1052): n is a, c, g, or t
  misc_feature (1054)..(1054): n is a, c, g, or t
  misc_feature (1056)..(1056): n is a, c, g, or t
  misc_feature (1061)..(1061): n is a, c, g, or t
  misc_feature (1065)..(1065): n is a, c, g, or t
  misc_feature (1071)..(1072): n is a, c, g, or t
  misc_feature (1101)..(1101): n is a, c, g, or t
  misc_feature (1103)..(1104): n is a, c, g, or t
  misc_feature (1112)..(1112): n is a, c, g, or t
  misc_feature (1116)..(1116): n is a, c, g, or t
  misc_feature (1119)..(1119): n is a, c, g, or t
  misc_feature (1130)..(1130): n is a, c, g, or t
  misc_feature (1146)..(1146): n is a, c, g, or t
  misc_feature (1148)..(1148): n is a, c, g, or t
  misc_feature (1150)..(1151): n is a, c, g, or t
  misc_feature (1156)..(1156): n is a, c, g, or t
  misc_feature (1166)..(1166): n is a, c, g, or t
  misc_feature (1172)..(1172): n is a, c, g, or t
  misc_feature (1183)..(1183): n is a, c, g, or t
  misc_feature (1185)..(1186): n is a, c, g, or t
  misc_feature (1191)..(1191): n is a, c, g, or t
  misc_feature (1194)..(1194): n is a, c, g, or t
  misc_feature (1198)..(1198): n is a, c, g, or t
  misc_feature (1201)..(1201): n is a, c, g, or t
  misc_feature (1203)..(1203): n is a, c, g, or t
  misc_feature (1212)..(1214): n is a, c, g, or t
  misc_feature (1220)..(1221): n is a, c, g, or t
  misc_feature (1223)..(1224): n is a, c, g, or t
  misc_feature (1230)..(1230): n is a, c, g, or t
  misc_feature (1232)..(1232): n is a, c, g, or t
  misc_feature (1235)..(1235): n is a, c, g, or t
  misc_feature (1239)..(1240): n is a, c, g, or t
  misc_feature (1242)..(1242): n is a, c, g, or t
  misc_feature (1251)..(1252): n is a, c, g, or t
  misc_feature (1254)..(1255): n is a, c, g, or t
  misc_feature (1273)..(1273): n is a, c, g, or t
  misc_feature (1277)..(1278): n is a, c, g, or t
  misc_feature (1280)..(1280): n is a, c, g, or t
  misc_feature (1290)..(1291): n is a, c, g, or t
  misc_feature (1293)..(1293): n is a, c, g, or t
  misc_feature (1297)..(1297): n is a, c, g, or t
  misc_feature (1305)..(1305): n is a, c, g, or t
  misc_feature (1313)..(1315): n is a, c, g, or t
  misc_feature (1318)..(1319): n is a, c, g, or t
  misc_feature (1321)..(1321): n is a, c, g, or t
  misc_feature (1324)..(1324): n is a, c, g, or t
  misc_feature (1328)..(1328): n is a, c, g, or t
  misc_feature (1331)..(1333): n is a, c, g, or t
  misc_feature (1336)..(1336): n is a, c, g, or t
  misc_feature (1344)..(1345): n is a, c, g, or t
  misc_feature (1354)..(1354): n is a, c, g, or t
  misc_feature (1365)..(1368): n is a, c, g, or t
  misc_feature (1370)..(1370): n is a, c, g, or t
nttagagaaattactatgagaggatcgcatcaccatcaccatcacggatcctatttaggtgacactatagaatcgtcgacccacgcgtccgagcgcggcgctgggaggagctgctgcagcggggcgcggcgcagctggcggagctcgggccaccgggcgtggggggcgtcggggcctgcaagctcggtcccggcaagggctctcgcaagaagagcaaatctccaaaatgatggagctggccagagagaaacaggcggcagagctgaaggccctgaaggagacgtcggagaagtacgactgcctccctcccacacctgcttcgcctcccagcaagggctcagccgcacaaaacagctccttcatgcctgtctctctgcagcgacaccaaagagatgaagaaaaagctggagacaaagagactggagcggatccagggcatgaccaaagtcaccacagacaagatggcccaggagagatgacggagaacttggagaggcaccaggagaagctggaggagaagcaggcggcttgcctggaacagatacgggagatggaaaagcagttccagaaggaggcgctggcagagtacgaggccaggatgaagggtctggaggcagaggtgaaggagtcggtgagggcctgcctcaggacctgctttccctccgaggccaaggacaagcctgagagggcctgcgagtgccccccagagctgtgtgagcaggacccactcatagcaaaggcagatgcccaggagagccgcctctgatgcccccatcccactgggacatttagcaaggaggttcagccccttctctgggatgtggttctattcccccaggaaaaaggagccccagccttctgaggctgtgggaacctgtggctgccttggacgctgcanccccctcctcacggccaggccaaantctgaaacaggacccaggcacccttcacggcagggcctctcttggggcctaaaaantcttctcaagctganttcctacctccccctccatctntananaatgtcnatnttttgttgaaggcnaaaaatntngnatggnaagncaaaanngggatcttggccccctttgcctttctatnannaacaactntggnttntttctccctgnaggttggacccttccntncnntttancccaaccttntgcccngtttcagcccntnnggctnccnaatngcntntccctcttnnnaaatcnngnnttctcnantcntggnngncctcctggnnannccccctcctttcttttcnaaannantaaaaaaaanntntttncttttttnaaaaaggnnnggnntnggntttnccnnnggncccctttnnggggggggnttttttttctnnnntn

SEQ ID NO: 133 - DNA, 1261 bp, Homo Sapiens
  misc_feature (775)..(775): n is a, c, g, or t
  misc_feature (827)..(827): n is a, c, g, or t
  misc_feature (847)..(847): n is a, c, g, or t
  misc_feature (865)..(865): n is a, c, g, or t
  misc_feature (871)..(872): n is a, c, g, or t
  misc_feature (882)..(882): n is a, c, g, or t
  misc_feature (917)..(917): n is a, c, g, or t
  misc_feature (920)..(920): n is a, c, g, or t
  misc_feature (923)..(923): n is a, c, g, or t
  misc_feature (959)..(959): n is a, c, g, or t
  misc_feature (974)..(974): n is a, c, g, or t
  misc_feature (986)..(986): n is a, c, g, or t
  misc_feature (990)..(990): n is a, c, g, or t
  misc_feature (993)..(993): n is a, c, g, or t
  misc_feature (997)..(998): n is a, c, g, or t
  misc_feature (1002)..(1002): n is a, c, g, or t
  misc_feature (1013)..(1013): n is a, c, g, or t
  misc_feature (1019)..(1019): n is a, c, g, or t
  misc_feature (1026)..(1026): n is a, c, g, or t
  misc_feature (1030)..(1030): n is a, c, g, or t
  misc_feature (1037)..(1037): n is a, c, g, or t
  misc_feature (1039)..(1039): n is a, c, g, or t
  misc_feature (1052)..(1052): n is a, c, g, or t
  misc_feature (1055)..(1057): n is a, c, g, or t
  misc_feature (1065)..(1065): n is a, c, g, or t
  misc_feature (1068)..(1071): n is a, c, g, or t
  misc_feature (1073)..(1073): n is a, c, g, or t
  misc_feature (1080)..(1085): n is a, c, g, or t
  misc_feature (1090)..(1091): n is a, c, g, or t
  misc_feature (1095)..(1095): n is a, c, g, or t
  misc_feature (1101)..(1101): n is a, c, g, or t
  misc_feature (1106)..(1106): n is a, c, g, or t
  misc_feature (1108)..(1109): n is a, c, g, or t
  misc_feature (1113)..(1113): n is a, c, g, or t
  misc_feature (1118)..(1118): n is a, c, g, or t
  misc_feature (1122)..(1123): n is a, c, g, or t
  misc_feature (1131)..(1131): n is a, c, g, or t
  misc_feature (1133)..(1140): n is a, c, g, or t
  misc_feature (1144)..(1145): n is a, c, g, or t
  misc_feature (1147)..(1147): n is a, c, g, or t
  misc_feature (1149)..(1151): n is a, c, g, or t
  misc_feature (1153)..(1155): n is a, c, g, or t
  misc_feature (1157)..(1160): n is a, c, g, or t
  misc_feature (1166)..(1166): n is a, c, g, or t
  misc_feature (1184)..(1184): n is a, c, g, or t
  misc_feature (1186)..(1186): n is a, c, g, or t
  misc_feature (1192)..(1196): n is a, c, g, or t
  misc_feature (1205)..(1206): n is a, c, g, or t
  misc_feature (1210)..(1211): n is a, c, g, or t
  misc_feature (1219)..(1220): n is a, c, g, or t
  misc_feature (1235)..(1237): n is a, c, g, or t
  misc_feature (1240)..(1245): n is a, c, g, or t
  misc_feature (1254)..(1254): n is a, c, g, or t
  misc_feature (1261)..(1261): n is a, c, g, or t
agaaattactatgagaggatcgcatcaccatcaccatcacggatcctatttaggtgacactatagaatcgtcgacccacgcgtccgccccaaaggaattccgagaaatctcttacctcaagaaattgaaggttaaaaagcaggaccgtatattccccccagaaaccagcgcctccgtggcggccacgcctccgccctccacagcctcggctcctgctgctgtgaactcctctgcttcagcagataagccattatccaacatgaagatcctgactctcgggaagctgtcccggaacaaggatgaagtgaaggccatgattgagaaactcggggggaagttgacggggacggccaacaaggcttccctgtgcatcagcaccaaaaaggaggtggaaaagatgaataagaagatggaggaagtaaaggaagccaacatccgagttgtgtctgaggacttcctccaggacgtctccgcctccaccaagagccttcaggagttgttcttagcgcacatcttgtccccttggggggcagaggtgaaggcagagcctgttgaagttgtggccccaagagggaagtcaggggctgcgctctccaaaaaagcaagggccaggtcaaggaggaaggtatcaacaaatctgaaaagagaatgaaattaactcttaaaggaggagcagctgtggatcctgattctggactggaacactctgcgcatgtcctggaaaaaggtgggaaggtcttcagtgccacccttggcctggtggacatcgttaaanggaaccaactcctactacaagctgcagcttctggaggacgacaaggaaaacnggtattggatattcaggtcntggggccgtgtgggtacngggatnnggtaaccaanaaactggaaaaaatgccgtccaagggaggatgccnttnganccctttcttggaaatttttttgaaaaaaaaaaaccngggaaacccttgggncctcccaaaaantttnccngaanntttncccaaaaaaanttttcnccccccngggnaaatttnanattttgggccccnaannnaaaaaaangcnnnngnaaaaaannnnnnaaaannaaantttttnggggncnnaaantttcnaaannttcccccnannnnnnnntttnngngnnncnnntnnnnaaaaanattttttttttttttggngnaaaaannnnnaaaaaaaanncccnngggggggnnaaaaaaaaaaaaaannnccnnnnnnaaaaaaaanccctttn

SEQ ID NO: 134 - DNA, 1200 bp, Homo Sapiens
  misc_feature (785)..(785): n is a, c, g, or t
  misc_feature (869)..(869): n is a, c, g, or t
  misc_feature (872)..(872): n is a, c, g, or t
  misc_feature (937)..(937): n is a, c, g, or t
  misc_feature (948)..(948): n is a, c, g, or t
  misc_feature (952)..(952): n is a, c, g, or t
  misc_feature (954)..(955): n is a, c, g, or t
  misc_feature (964)..(964): n is a, c, g, or t
  misc_feature (967)..(967): n is a, c, g, or t
  misc_feature (969)..(969): n is a, c, g, or t
  misc_feature (977)..(977): n is a, c, g, or t
  misc_feature (980)..(980): n is a, c, g, or t
  misc_feature (988)..(988): n is a, c, g, or t
  misc_feature (990)..(990): n is a, c, g, or t
  misc_feature (1012)..(1012): n is a, c, g, or t
  misc_feature (1014)..(1014): n is a, c, g, or t
  misc_feature (1021)..(1021): n is a, c, g, or t
  misc_feature (1023)..(1023): n is a, c, g, or t
  misc_feature (1026)..(1026): n is a, c, g, or t
  misc_feature (1032)..(1032): n is a, c, g, or t
  misc_feature (1035)..(1035): n is a, c, g, or t
  misc_feature (1038)..(1038): n is a, c, g, or t
  misc_feature (1046)..(1046): n is a, c, g, or t
  misc_feature (1050)..(1050): n is a, c, g, or t
  misc_feature (1052)..(1053): n is a, c, g, or t
  misc_feature (1056)..(1056): n is a, c, g, or t
  misc_feature (1062)..(1063): n is a, c, g, or t
  misc_feature (1068)..(1068): n is a, c, g, or t
  misc_feature (1076)..(1079): n is a, c, g, or t
  misc_feature (1082)..(1082): n is a, c, g, or t
  misc_feature (1085)..(1085): n is a, c, g, or t
  misc_feature (1091)..(1092): n is a, c, g, or t
  misc_feature (1098)..(1098): n is a, c, g, or t
  misc_feature (1101)..(1101): n is a, c, g, or t
  misc_feature (1103)..(1105): n is a, c, g, or t
  misc_feature (1109)..(1110): n is a, c, g, or t
  misc_feature (1113)..(1125): n is a, c, g, or t
  misc_feature (1128)..(1130): n is a, c, g, or t
  misc_feature (1134)..(1135): n is a, c, g, or t
  misc_feature (1138)..(1139): n is a, c, g, or t
  misc_feature (1142)..(1144): n is a, c, g, or t
  misc_feature (1149)..(1150): n is a, c, g, or t
  misc_feature (1153)..(1153): n is a, c, g, or t
  misc_feature (1156)..(1156): n is a, c, g, or t
  misc_feature (1160)..(1161): n is a, c, g, or t
  misc_feature (1163)..(1163): n is a, c, g, or t
  misc_feature (1169)..(1169): n is a, c, g, or t
  misc_feature (1175)..(1176): n is a, c, g, or t
  misc_feature (1179)..(1179): n is a, c, g, or t
  misc_feature (1182)..(1186): n is a, c, g, or t
  misc_feature (1192)..(1193): n is a, c, g, or t
  misc_feature (1195)..(1197): n is a, c, g, or t
tagagaaattactatgagaggatcgcatcaccatcaccatcacggatcctatttaggtgacactatagaatcgtcgacccacgcgtccgctcgcaggcaccatgactcctgtgaggatgcagcactccctggcaggtcagacctatgccgtgcccctcatccagccagacctgcggcgagaggaggccgtccagcagatggcggatgccctgcagtacctgcagaaggtctctggagacatcttcagcaggtagagcagagccggagccaggtgcaggccattggagagaaggtctccttggcccaggccaagattgagaagatcaagggcagcaagaaggccatcaaggtgttctccagtgccaagtaccctgctccagagcacctgcaggaatatggctccatcttcacgggcgcccaggaccctggcctgcagagacgcccccgccacaggatccagagcaagcaccgccccctggacgagcgggccctgcagccctcccaggagaagctgaaggaatttcctgtgtgcgtgagcaccaagccggagcccgaggacgatgcagaagagggacttgggggtcttcccagcaacatcagctctgtcagctccttgctgcttttcaacaccaccgagaacctgtagaagaagtatgtcttcctggaccccctggctggtgctgtaacaaagacccatgtgatgctgggggcagagacagaggagaagctgtttgatgcccccttgtccatcagcaagagagagcagctggaacagcaggtcccanagaactacttctatgtgccagacctgggccaggtgcctgaaattgatgttccatcctacctgcctgacctgcccggcattgccnaangacctcatgtacattgccgacctgggccccggcattgccccctctgcccctgggcaccattccanaactgcccacnttcnannctgaggtanccnancctctcanggnaaacttananaatgggtattaaaacaaccccnanggccccnanaanttcccnaanttntgaggggntggnannggnaccccnnttccnaccttaannnnggnccntgtagnnaagggnccngnnnggannaannnnnnnnnnnnnttnnntttnntcnnggnnntcccnnggnaanggtnnancccccngggggnnggnccnnnnnttaaanncnnnccc

SEQ ID NO: 135 - DNA, 1200 bp, Homo Sapiens
  misc_feature (842)..(842): n is a, c, g, or t
  misc_feature (980)..(980): n is a, c, g, or t
  misc_feature (983)..(983): n is a, c, g, or t
  misc_feature (1013)..(1013): n is a, c, g, or t
  misc_feature (1022)..(1022): n is a, c, g, or t
  misc_feature (1036)..(1036): n is a, c, g, or t
  misc_feature (1039)..(1039): n is a, c, g, or t
  misc_feature (1046)..(1046): n is a, c, g, or t
  misc_feature (1050)..(1050): n is a, c, g, or t
  misc_feature (1053)..(1053): n is a, c, g, or t
  misc_feature (1057)..(1058): n is a, c, g, or t
  misc_feature (1064)..(1064): n is a, c, g, or t
  misc_feature (1072)..(1072): n is a, c, g, or t
  misc_feature (1076)..(1076): n is a, c, g, or t
  misc_feature (1082)..(1082): n is a, c, g, or t
  misc_feature (1086)..(1086): n is a, c, g, or t
  misc_feature (1090)..(1090): n is a, c, g, or t
  misc_feature (1099)..(1099): n is a, c, g, or t
  misc_feature (1102)..(1102): n is a, c, g, or t
  misc_feature (1110)..(1110): n is a, c, g, or t
  misc_feature (1116)..(1116): n is a, c, g, or t
  misc_feature (1136)..(1136): n is a, c, g, or t
  misc_feature (1146)..(1146): n is a, c, g, or t
  misc_feature (1156)..(1157): n is a, c, g, or t
  misc_feature (1160)..(1160): n is a, c, g, or t
  misc_feature (1164)..(1164): n is a, c, g, or t
  misc_feature (1170)..(1171): n is a, c, g, or t
  misc_feature (1176)..(1177): n is a, c, g, or t
  misc_feature (1181)..(1181): n is a, c, g, or t
  misc_feature (1191)..(1191): n is a, c, g, or t
tagagaaattactatgagaggatcgcatcaccatcaccatcacggatcctatttaggtgacactatagaatcgtcgacccacgcgtccgcggtctttctatggagcatgaggtcctacacgttaattcggaagctagagggccatcaaagcagtgttgtctcttgtgacttctcccccgactctgccctgcttgtcacggcttcttacgataccaatgtgattatgtgggacccctacaccggcgaaaggctgaggtcactccaccacacccaggttgaccccgccatggatgacagtgacgtccacattagctcactgagatctgtgtgcttctctccagaaggcttgtaccttgccacggtggcagatgacagactcctcaggatctgggccctggaactgaaaactcccattgcatttgctcctatgaccaatgggctttgctgcacattttttccacatggtggagtcattgccacagggacaagagatggccacgtccagttctggacagctcctagggtcctgtcctcactgaagcacttatgccggaaagcccttcgaagtttcctaacaacttaccaagtcctagcactgccaatccccaagaaaatgaaagagttcctcacatacaggactttttaagcaacaccacatcttgtgcttctttgtagcagggtaaatcgtcctgtcaaagggagttgctggaataatgggccaaacatctggtcttgcattgaaatagcatttctttgggattgtgaatagaatgtagcaaaaccagattccagtgtactagtcatggatctttctctccctggcatgtgaaagtcagtcttanaggaagagattccacttgcacggcaacagagccttacgttaaaattttcagtccagttatgaacagcaagtgttgaactctttctgcttgttttgattcaaagtgcagttactgatgttgttttgatatgcaactaantangcctccaaagcctctctagtggcaaaacanctcaaactncccccgctgggaanganggcttcngccnaanaccnnccttgngttctgangcangggaancatnggtncaagttccnccngctggggncaaaantgctccaaggtggccaaggntttttttttngggctccttnnganctgnaggaanntttcnnggancccttttggnagaaggaaa

SEQ ID NO: 136 - DNA, 2697 bp, Homo Sapiens
ggcgcgccacgcgtcgaccatgagccatccggattatcgtatgaatctgcgtccgctgggtacaccgcgtggtgttagcgcagttgcaggtccgcatgatattggtgcatctccgggtgataaaaaaagcaaaaatcgtagcacccgtggcaaaaaaaaaagcatttttgaaacctatatgagcaaagaagatgttagcgaaggtctgaaacgtggcacactgattcagggtgttctgcgtattaatccgaaaaaatttcatgaagcctttattccgtcaccggatggtgatcgcgacatttttattgatggtgtggttgcacgtaatcgtgcactgaatggtgatctggttgttgttaaactgctgccggaagaacattggaaagttgtgaaaccggaaagcaatgataaagaaaccgaagcagcctatgaaagcgatattccggaagaactgtgtggtcatcatctgccgcagcagagcctgaaaagctataatgattctccggatgttattgttgaagcccagtttgatggtagcgatagcgaagatggtcatggtattacccagaatgttctggttgatggcgttaaaaaactgagcgtttgcgttagcgaaaaaggtcgtgaagatggtgatgcaccggttaccaaagatgaaaccacctgtattagccaggatacccgtgcactgagcgaaaaaagcctgcagcgtagcgcaaaagttgtgtatattctggaaaaaaaacatagccgtgcagcaaccggttttctgaaactgctggccgataaaaatagcgaactgtttcgcaaatatgcactgtttagcccgagcgatcatcgtgttccgcgtatttatgttccgctgaaagattgtccgcaggattttgttgcacgtccgaaagattatgccaataccctgtttatttgccgtattgtggattggaaagaagattgcaattttgcactgggtcagctggcaaaaagcctgggtcaggcaggcgaaattgaaccggaaaccgaaggtattctgaccgaatatggcgttgattttagcgatttttccagcgaagttctggaatgtctgccgcagggtctgccgtggaccattcctccggaagaatttagcaaacgtcgtgatctgcgcaaagattgcatttttaccattgatccgagcaccgcacgtgatctggatgatgcactgagctgtaaaccgctggcagatggcaattttaaagtgggtgtgcatattgcagatgtgagctattttgttccggaaggtagcgatctggataaagttgcagcagaacgtgcaaccagcgtttatctggttcagaaagttgttccgatgctgccgcgtctgctgtgtgaagaactgtgcagcctgaatccgatgagcgataaactgacctttagcgttatttggaccctgacaccggaaggtaaaattctggatgaatggtttggtcgtaccattattcgtagctgtaccaaactgagctatgaacatgcacagagcatgattgaaagcccgaccgaaaaaattccggcaaaagaactgccgccgatttctccggaacatagcagcgaagaagttcatcaggcagttctgaatctgcatggtattgctaaacagctgcgtcagcagcgttttgttgatggtgcactgcgtctggatcagctgaaactggcatttaccctggatcatgaaaccggtctgccgcagggctgtcatatttatgaatatcgcgaaagcaataaactggtggaagaatttatgctgctggcaaatatggcagttgcccataaaattcatcgtgcatttccggaacaggcactgctgcgtcgtcatccgccaccgcagacccgtatgctgagcgatctggttgaattttgtgatcagatgggtctgccggttgatttttctagcgcaggcgcactgaataaaagcctgacccagacctttggtgatgataaatatagcctggcacgtaaagaggttctgaccaatatgtgtagccgtccgatgcagatggcactgtatttttgtagcggtctgctgcaggacccggcacagtttcgtcattatgcactgaatgttccgctgtatacccattttaccagcccgattcgtcgttttgcagatgttctggttcatcgtctgctggcagcagcactgggttatcgtgaacgtctggatatggcaccggataccctgcagaaacaggcagatcattgtaatgatcgtcgtatggcaagcaaacgtgttcaggaactgagcaccagcctgttttttgcagttctggtgaaagaaagcggtccgctggaaagcgaagcaatggttatgggtattctgaaacaggcatttgatgttctggtgctgcgttatggtgttcagaaacgcatttattgtaatgcactggcactgcgtagccatcattttcagaaagtgggcaaaaaaccggaactgaccctggtttgggaacctgaagatatggaacaggaaccggcacagcaggttattaccatttttagcctggttgaagttgttctgcaggcagaaagcaccgcactgaaatatagcgcaattctgaaacgtccgggtacacagggtcatctgggtccggaaaaagaagaagaagaatctgacggcgaaccggaagattctagcaccagctaagcggccgcttgattaattaa

SEQ ID NO: 137 - DNA, 1323 bp, Homo Sapiens
  misc_feature (3)..(3): n is a, c, g, or t
  misc_feature (6)..(11): n is a, c, g, or t
  misc_feature (427)..(427): n is a, c, g, or t
  misc_feature (501)..(501): n is a, c, g, or t
  misc_feature (521)..(521): n is a, c, g, or t
  misc_feature (527)..(527): n is a, c, g, or t
  misc_feature (535)..(535): n is a, c, g, or t
  misc_feature (560)..(560): n is a, c, g, or t
  misc_feature (594)..(594): n is a, c, g, or t
  misc_feature (618)..(618): n is a, c, g, or t
  misc_feature (634)..(634): n is a, c, g, or t
  misc_feature (639)..(639): n is a, c, g, or t
  misc_feature (650)..(650): n is a, c, g, or t
  misc_feature (655)..(656): n is a, c, g, or t
  misc_feature (660)..(661): n is a, c, g, or t
  misc_feature (671)..(671): n is a, c, g, or t
  misc_feature (673)..(673): n is a, c, g, or t
  misc_feature (676)..(676): n is a, c, g, or t
  misc_feature (679)..(679): n is a, c, g, or t
  misc_feature (688)..(688): n is a, c, g, or t
  misc_feature (698)..(698): n is a, c, g, or t
  misc_feature (704)..(704): n is a, c, g, or t
  misc_feature (724)..(724): n is a, c, g, or t
  misc_feature (729)..(729): n is a, c, g, or t
  misc_feature (740)..(740): n is a, c, g, or t
  misc_feature (744)..(744): n is a, c, g, or t
  misc_feature (746)..(747): n is a, c, g, or t
  misc_feature (750)..(750): n is a, c, g, or t
  misc_feature (755)..(756): n is a, c, g, or t
  misc_feature (763)..(763): n is a, c, g, or t
  misc_feature (767)..(767): n is a, c, g, or t
  misc_feature (775)..(776): n is a, c, g, or t
  misc_feature (778)..(779): n is a, c, g, or t
  misc_feature (781)..(781): n is a, c, g, or t
  misc_feature (784)..(785): n is a, c, g, or t
  misc_feature (793)..(795): n is a, c, g, or t
  misc_feature (802)..(802): n is a, c, g, or t
  misc_feature (804)..(805): n is a, c, g, or t
  misc_feature (807)..(808): n is a, c, g, or t
  misc_feature (810)..(810): n is a, c, g, or t
  misc_feature (816)..(816): n is a, c, g, or t
  misc_feature (822)..(823): n is a, c, g, or t
  misc_feature (827)..(827): n is a, c, g, or t
  misc_feature (830)..(830): n is a, c, g, or t
  misc_feature (832)..(832): n is a, c, g, or t
  misc_feature (835)..(835): n is a, c, g, or t
  misc_feature (837)..(839): n is a, c, g, or t
  misc_feature (841)..(841): n is a, c, g, or t
  misc_feature (843)..(843): n is a, c, g, or t
  misc_feature (850)..(851): n is a, c, g, or t
  misc_feature (853)..(855): n is a, c, g, or t
  misc_feature (860)..(862): n is a, c, g, or t
  misc_feature (864)..(864): n is a, c, g, or t
  misc_feature (866)..(866): n is a, c, g, or t
  misc_feature (868)..(872): n is a, c, g, or t
  misc_feature (876)..(876): n is a, c, g, or t
  misc_feature (878)..(879): n is a, c, g, or t
  misc_feature (884)..(884): n is a, c, g, or t
  misc_feature (888)..(889): n is a, c, g, or t
  misc_feature (892)..(895): n is a, c, g, or t
  misc_feature (902)..(902): n is a, c, g, or t
  misc_feature (905)..(905): n is a, c, g, or t
  misc_feature (908)..(908): n is a, c, g, or t
  misc_feature (910)..(910): n is a, c, g, or t
  misc_feature (912)..(914): n is a, c, g, or t
  misc_feature (917)..(918): n is a, c, g, or t
  misc_feature (920)..(920): n is a, c, g, or t
  misc_feature (927)..(928): n is a, c, g, or t
  misc_feature (930)..(930): n is a, c, g, or t
  misc_feature (935)..(936): n is a, c, g, or t
  misc_feature (938)..(939): n is a, c, g, or t
  misc_feature (941)..(941): n is a, c, g, or t
  misc_feature (952)..(952): n is a, c, g, or t
  misc_feature (958)..(959): n is a, c, g, or t
  misc_feature (962)..(962): n is a, c, g, or t
  misc_feature (965)..(966): n is a, c, g, or t
  misc_feature (971)..(971): n is a, c, g, or t
  misc_feature (973)..(973): n is a, c, g, or t
  misc_feature (976)..(976): n is a, c, g, or t
  misc_feature (981)..(981): n is a, c, g, or t
  misc_feature (983)..(983): n is a, c, g, or t
  misc_feature (985)..(985): n is a, c, g, or t
  misc_feature (988)..(989): n is a, c, g, or t
  misc_feature (992)..(993): n is a, c, g, or t
  misc_feature (996)..(996): n is a, c, g, or t
  misc_feature (998)..(999): n is a, c, g, or t
  misc_feature (1004)..(1004): n is a, c, g, or t
  misc_feature (1014)..(1014): n is a, c, g, or t
  misc_feature (1017)..(1017): n is a, c, g, or t
  misc_feature (1019)..(1020): n is a, c, g, or t
  misc_feature (1026)..(1026): n is a, c, g, or t
  misc_feature (1034)..(1035): n is a, c, g, or t
  misc_feature (1037)..(1041): n is a, c, g, or t
  misc_feature (1044)..(1045): n is a, c, g, or t
  misc_feature (1047)..(1047): n is a, c, g, or t
  misc_feature (1049)..(1049): n is a, c, g, or t
  misc_feature (1054)..(1055): n is a, c, g, or t
  misc_feature (1058)..(1060): n is a, c, g, or t
  misc_feature (1062)..(1062): n is a, c, g, or t
  misc_feature (1066)..(1067): n is a, c, g, or t
  misc_feature (1069)..(1069): n is a, c, g, or t
  misc_feature (1076)..(1079): n is a, c, g, or t
  misc_feature (1082)..(1082): n is a, c, g, or t
  misc_feature (1091)..(1091): n is a, c, g, or t
  misc_feature (1095)..(1095): n is a, c, g, or t
  misc_feature (1097)..(1097): n is a, c, g, or t
  misc_feature (1099)..(1099): n is a, c, g, or t
  misc_feature (1101)..(1101): n is a, c, g, or t
  misc_feature (1103)..(1103): n is a, c, g, or t
  misc_feature (1107)..(1107): n is a, c, g, or t
  misc_feature (1109)..(1110): n is a, c, g, or t
  misc_feature (1113)..(1114): n is a, c, g, or t
  misc_feature (1120)..(1120): n is a, c, g, or t
  misc_feature (1122)..(1122): n is a, c, g, or t
  misc_feature (1126)..(1126): n is a, c, g, or t
  misc_feature (1128)..(1128): n is a, c, g, or t
  misc_feature (1130)..(1130): n is a, c, g, or t
  misc_feature (1132)..(1132): n is a, c, g, or t
  misc_feature (1135)..(1135): n is a, c, g, or t
  misc_feature (1138)..(1138): n is a, c, g, or t
  misc_feature (1141)..(1144): n is a, c, g, or t
  misc_feature (1147)..(1150): n is a, c, g, or t
  misc_feature (1154)..(1155): n is a, c, g, or t
  misc_feature (1159)..(1159): n is a, c, g, or t
  misc_feature (1161)..(1161): n is a, c, g, or t
  misc_feature (1163)..(1163): n is a, c, g, or t
  misc_feature (1165)..(1166): n is a, c, g, or t
  misc_feature (1168)..(1169): n is a, c, g, or t
  misc_feature (1175)..(1176): n is a, c, g, or t
  misc_feature (1179)..(1179): n is a, c, g, or t
  misc_feature (1181)..(1182): n is a, c, g, or t
  misc_feature (1184)..(1186): n is a, c, g, or t
  misc_feature (1189)..(1189): n is a, c, g, or t
  misc_feature (1192)..(1194): n is a, c, g, or t
  misc_feature (1196)..(1197): n is a, c, g, or t
  misc_feature (1199)..(1199): n is a, c, g, or t
  misc_feature (1202)..(1202): n is a, c, g, or t
  misc_feature (1204)..(1204): n is a, c, g, or t
  misc_feature (1207)..(1207): n is a, c, g, or t
  misc_feature (1209)..(1210): n is a, c, g, or t
  misc_feature (1213)..(1214): n is a, c, g, or t
  misc_feature (1216)..(1216): n is a, c, g, or t
  misc_feature (1218)..(1218): n is a, c, g, or t
  misc_feature (1221)..(1221): n is a, c, g, or t
  misc_feature (1224)..(1224): n is a, c, g, or t
  misc_feature (1228)..(1228): n is a, c, g, or t
  misc_feature (1230)..(1230): n is a, c, g, or t
  misc_feature (1234)..(1234): n is a, c, g, or t
  misc_feature (1238)..(1239): n is a, c, g, or t
  misc_feature (1242)..(1242): n is a, c, g, or t
  misc_feature (1245)..(1246): n is a, c, g, or t
  misc_feature (1248)..(1248): n is a, c, g, or t
  misc_feature (1253)..(1253): n is a, c, g, or t
  misc_feature (1255)..(1255): n is a, c, g, or t
  misc_feature (1258)..(1258): n is a, c, g, or t
  misc_feature (1260)..(1262): n is a, c, g, or t
  misc_feature (1264)..(1264): n is a, c, g, or t
  misc_feature (1268)..(1270): n is a, c, g, or t
  misc_feature (1274)..(1276): n is a, c, g, or t
  misc_feature (1280)..(1280): n is a, c, g, or t
  misc_feature (1284)..(1284): n is a, c, g, or t
  misc_feature (1286)..(1286): n is a, c, g, or t
  misc_feature (1289)..(1292): n is a, c, g, or t
  misc_feature (1294)..(1298): n is a, c, g, or t
  misc_feature (1303)..(1304): n is a, c, g, or t
  misc_feature (1306)..(1306): n is a, c, g, or t
  misc_feature (1308)..(1308): n is a, c, g, or t
  misc_feature (1310)..(1310): n is a, c, g, or t
  misc_feature (1313)..(1314): n is a, c, g, or t
  misc_feature (1317)..(1323): n is a, c, g, or t
ctnctnnnnnnaatagagaaatactatgagaggatcgcatcaccatcaccatcacggatcctatttaggtgacactatagaatcgtcgacccacgcgtccggcagcgatcagcgccgccgcccgtgcctttcctcttcctcctcctcctccttggcatccgcctcttcttcctcctgcgtcctcccccgctgcctccgctgctcccgacgcggagcccggagcccgcgccgagcccctggcctcgcggtgccatgctgccccggcggcggcgctgaaggatggcgacgccgctgcctccgccctccccgcggcacctgcggctgctgcggctgctgctctccggcctcgtcctcggcgccgccctgcgtggagccgccgccggccacccggatgtagccgcctgtcccgggagcctggactgtgccntgaagaggcgggcaaggtgtcctcctggtgcacatgcctgtgggccctgccttcagcccttccaggaggaccancaagggctctgtgtgcccangatgcnccggcctncaggcgggggccggccccagcccanactggaagatgaaattgacttcctggcccaggancttgcccggaaggagtctggacantcaactccgcccctanccaangaccgacagangctannggannctgcctgggnancanagnctggaaaanaagcgcgganatgtancacttaccatcaccaacggnaacanaatgctgtgcntganannagnaaaannggcagcncccngaaatggnnannantannaaaaaaannnaaaaaantnnannanaaaaanaaaatnnaaanaananatnannnananaatatannannnaaaannntntnannnnnaatnannaaaantaannaannnnaaaatanatnaananannnaannanaaaaaanntnaaaannannantatataaaaanaaaatnnaantannaaaananaanaatanananatnnatnnatnannaattntaaattaaanaanannaaaaanaaaaatannannnnnaannanantaaanntannntnaatnnanaaataannnnatnaaaataaanatanananananaaanannaannaaaaananattntnananaanaanaannnnttnnnnaaannaaanananannannataaannaantnntnnnaanaannntnnanaananaanannaannantnaanaantaananaaanaaannaanttnnanaaaananaanannnanaaannnaaannnaaanaaananaannnnannnnnaaaannanananaannaannnnnnn

SEQ ID NO: 138 - DNA, 1385 bp, Homo Sapiens
  misc_feature (873)..(873): n is a, c, g, or t
  misc_feature (920)..(920): n is a, c, g, or t
  misc_feature (931)..(972): n is a, c, g, or t
  misc_feature (980)..(980): n is a, c, g, or t
  misc_feature (984)..(984): n is a, c, g, or t
  misc_feature (993)..(993): n is a, c, g, or t
  misc_feature (998)..(999): n is a, c, g, or t
  misc_feature (1001)..(1002): n is a, c, g, or t
  misc_feature (1024)..(1024): n is a, c, g, or t
  misc_feature (1031)..(1031): n is a, c, g, or t
  misc_feature (1047)..(1049): n is a, c, g, or t
  misc_feature (1052)..(1052): n is a, c, g, or t
  misc_feature (1057)..(1057): n is a, c, g, or t
  misc_feature (1071)..(1071): n is a, c, g, or t
  misc_feature (1076)..(1076): n is a, c, g, or t
  misc_feature (1082)..(1083): n is a, c, g, or t
  misc_feature (1088)..(1088): n is a, c, g, or t
  misc_feature (1094)..(1094): n is a, c, g, or t
  misc_feature (1115)..(1115): n is a, c, g, or t
  misc_feature (1117)..(1117): n is a, c, g, or t
  misc_feature (1120)..(1120): n is a, c, g, or t
  misc_feature (1131)..(1131): n is a, c, g, or t
  misc_feature (1151)..(1152): n is a, c, g, or t
  misc_feature (1192)..(1192): n is a, c, g, or t
  misc_feature (1199)..(1199): n is a, c, g, or t
  misc_feature (1205)..(1207): n is a, c, g, or t
  misc_feature (1212)..(1212): n is a, c, g, or t
  misc_feature (1215)..(1215): n is a, c, g, or t
  misc_feature (1234)..(1234): n is a, c, g, or t
  misc_feature (1240)..(1241): n is a, c, g, or t
  misc_feature (1243)..(1243): n is a, c, g, or t
  misc_feature (1247)..(1247): n is a, c, g, or t
  misc_feature (1254)..(1254): n is a, c, g, or t
  misc_feature (1257)..(1257): n is a, c, g, or t
  misc_feature (1267)..(1268): n is a, c, g, or t
  misc_feature (1270)..(1270): n is a, c, g, or t
  misc_feature (1283)..(1283): n is a, c, g, or t
  misc_feature (1289)..(1289): n is a, c, g, or t
  misc_feature (1293)..(1293): n is a, c, g, or t
  misc_feature (1296)..(1296): n is a, c, g, or t
  misc_feature (1305)..(1305): n is a, c, g, or t
  misc_feature (1309)..(1309): n is a, c, g, or t
  misc_feature (1325)..(1326): n is a, c, g, or t
  misc_feature (1328)..(1328): n is a, c, g, or t
  misc_feature (1330)..(1331): n is a, c, g, or t
  misc_feature (1339)..(1339): n is a, c, g, or t
  misc_feature (1344)..(1344): n is a, c, g, or t
  misc_feature (1350)..(1350): n is a, c, g, or t
  misc_feature (1357)..(1358): n is a, c, g, or t
  misc_feature (1368)..(1368): n is a, c, g, or t
  misc_feature (1370)..(1370): n is a, c, g, or t
  misc_feature (1372)..(1373): n is a, c, g, or t
  misc_feature (1376)..(1376): n is a, c, g, or t
  misc_feature (1381)..(1381): n is a, c, g, or t
tagagaaattactatgagaggatcgcatcaccatcaccatcacggatcctatttaggtgacactatagaatcgtcgacccacgcgtccgggaagatggctgccgcctgggggtcgtccctaacggccgcgacgcagagagcggtcactccctggccgaggggcaggctcctcacggcctccctgggaccccaggcgcgtcgggaggcgtcgtcctccagccccgaggccggcgaagggcagatccgcctcacagacagttgcgtccagaggcttttggaaatcaccgaagggtcagaattcctcaggctgcaagtggagggaggtggatgctccggattccaatacaaattttcactggatacagttatcaaccccgacgacagggtatttgaacagggtggggcaagagtggtggttgactctgatagcttggccttcgtgaaaggggcccaggtggacttcagccaagaactgatccgaagctcatttcaagtgttgaacaatcctcaagcacagcaaggctgctcctgtgggtcatctttctctatcaaactttgatgtgatgactggtgactctgggattgtcaccagttgtaccaatttgaagaacctggaattagtagaattctagaagtttacttctaatcatgtccctctcaattttatttcccgcagtccaggagtgttatgttttgccactattattttcagaatgtgaagattttactcttggcttaatttttccctccactcagtgctaaggctgagcctccagatgctgttacctcagatttaatcactggttgaaactccgtataatctgtagagcctccatggctctaaaatttggaattaacttctcttgccttaanagctgcttgtacatatgtggatagctatgtataaaagcttcattttnaagagaaaaannnnnnnnnnnnnnnnnnnnnnnnnnnnnnnnnnnnnnnnnnaaaaggcngccncccccctanagganncnnaataaacttaattacctgaaantggaacnctttttgaaaaatccnnnaangaccnccaaaacccccttntggantttttnnaaaancccggntggcccccgggggtttttttntnggngaaaaacccancctacttggggaaaattttnnggaactaggaacttaaatggaaaaaaaatccctgggaaancccccgnttaatnnncccanggncccaaaaaaaatttggggnttttcnncntttncccaggnacnaaaaaaaacnntncctggaaataccncttttnaaanccnaaaaaaaanccanttttttccgccttttnntntnntcccccgnaaaancccccnattttannaaaaaaaagnantnnttnaaatnttcc

SEQ ID NO: 139 - DNA, 1200 bp, Homo Sapiens
  misc_feature (1)..(1): n is a, c, g, or t
  misc_feature (754)..(754): n is a, c, g, or t
  misc_feature (757)..(757): n is a, c, g, or t
  misc_feature (784)..(784): n is a, c, g, or t
  misc_feature (789)..(789): n is a, c, g, or t
  misc_feature (792)..(792): n is a, c, g, or t
  misc_feature (795)..(795): n is a, c, g, or t
  misc_feature (797)..(797): n is a, c, g, or t
  misc_feature (834)..(834): n is a, c, g, or t
  misc_feature (836)..(836): n is a, c, g, or t
  misc_feature (842)..(842): n is a, c, g, or t
  misc_feature (852)..(852): n is a, c, g, or t
  misc_feature (864)..(864): n is a, c, g, or t
  misc_feature (866)..(866): n is a, c, g, or t
  misc_feature (872)..(873): n is a, c, g, or t
  misc_feature (880)..(881): n is a, c, g, or t
  misc_feature (886)..(886): n is a, c, g, or t
  misc_feature (893)..(893): n is a, c, g, or t
  misc_feature (897)..(897): n is a, c, g, or t
  misc_feature (899)..(899): n is a, c, g, or t
  misc_feature (903)..(903): n is a, c, g, or t
  misc_feature (915)..(915): n is a, c, g, or t
  misc_feature (917)..(917): n is a, c, g, or t
  misc_feature (921)..(922): n is a, c, g, or t
  misc_feature (936)..(936): n is a, c, g, or t
  misc_feature (941)..(941): n is a, c, g, or t
  misc_feature (945)..(946): n is a, c, g, or t
  misc_feature (953)..(953): n is a, c, g, or t
  misc_feature (962)..(963): n is a, c, g, or t
  misc_feature (968)..(968): n is a, c, g, or t
  misc_feature (974)..(975): n is a, c, g, or t
  misc_feature (980)..(980): n is a, c, g, or t
  misc_feature (986)..(986): n is a, c, g, or t
  misc_feature (994)..(994): n is a, c, g, or t
  misc_feature (996)..(996): n is a, c, g, or t
  misc_feature (1000)..(1000): n is a, c, g, or t
  misc_feature (1006)..(1007): n is a, c, g, or t
  misc_feature (1013)..(1013): n is a, c, g, or t
  misc_feature (1019)..(1020): n is a, c, g, or t
  misc_feature (1022)..(1024): n is a, c, g, or t
  misc_feature (1030)..(1030): n is a, c, g, or t
  misc_feature (1032)..(1032): n is a, c, g, or t
  misc_feature (1034)..(1034): n is a, c, g, or t
  misc_feature (1037)..(1038): n is a, c, g, or t
  misc_feature (1045)..(1045): n is a, c, g, or t
  misc_feature (1047)..(1047): n is a, c, g, or t
  misc_feature (1049)..(1049): n is a, c, g, or t
  misc_feature (1053)..(1053): n is a, c, g, or t
  misc_feature (1055)..(1055): n is a, c, g, or t
  misc_feature (1059)..(1059): n is a, c, g, or t
  misc_feature (1065)..(1065): n is a, c, g, or t
  misc_feature (1071)..(1071): n is a, c, g, or t
  misc_feature (1076)..(1076): n is a, c, g, or t
  misc_feature (1078)..(1078): n is a, c, g, or t
  misc_feature (1081)..(1081): n is a, c, g, or t
  misc_feature (1083)..(1083): n is a, c, g, or t
  misc_feature (1097)..(1097): n is a, c, g, or t
  misc_feature (1099)..(1099): n is a, c, g, or t
  misc_feature (1101)..(1101): n is a, c, g, or t
  misc_feature (1107)..(1107): n is a, c, g, or t
  misc_feature (1110)..(1112): n is a, c, g, or t
  misc_feature (1114)..(1114): n is a, c, g, or t
  misc_feature (1117)..(1117): n is a, c, g, or t
  misc_feature (1120)..(1120): n is a, c, g, or t
  misc_feature (1129)..(1129): n is a, c, g, or t
  misc_feature (1134)..(1137): n is a, c, g, or t
  misc_feature (1140)..(1140): n is a, c, g, or t
  misc_feature (1142)..(1142): n is a, c, g, or t
  misc_feature (1145)..(1145): n is a, c, g, or t
  misc_feature (1148)..(1148): n is a, c, g, or t
  misc_feature (1150)..(1150): n is a, c, g, or t
  misc_feature (1157)..(1157): n is a, c, g, or t
  misc_feature (1159)..(1159): n is a, c, g, or t
  misc_feature (1166)..(1166): n is a, c, g, or t
  misc_feature (1174)..(1175): n is a, c, g, or t
  misc_feature (1193)..(1195): n is a, c, g, or t
  misc_feature (1200)..(1200): n is a, c, g, or t
nttagagaaattactatgagaggatcgcatcaccatcaccatcacggtatcctatttaggtgacactatagaatcgtcgacccacgcgtccgcgagcgaggccggccgcgccatgcacctgatgaagaagcgggagaagcagcgcgagcagatggagcagatgaagcagcgcatcgcggaggagaacatcatgaaatccaacattgacaagaagttctctgcgcactacgacgcggtggaggcagagctcaagtccagcaccgtgggtctcgtgaccctgaatgacatgaaggccaagcaggaggctctggtgaaggagcgggagaagcagctggccaagaaggagcagtccaaggagctgcagatgaagctggagaagcttcgagagaaggagcgtaagaaggaagccaagcggaagatctccagcctgtccttcaccctggaggaggaagaagagggaggcgaggaggaagaggaggcggccatgtatgaggaggagatggaaagggaagagatcaccacgaagaagagaaaactggggaagaacccagacgttgacacaagcttcttgcctgatcgagaccgtgaggaggaggagaatcggcttcgggaagagctgcggcaggagtgggaagccaagcaggagaagatcaagagtgaggagatcgagatcaccttcagctactgggatggctctgggcaccggcggacagtcaagatgagaaagggcaacaccatgcagcagttcctgcanaangcgctcgagatccttcggaaagacttncattnagnctnangttcccaggggggtggagcagctccatgttcttccangnaagganttgatttttnccttcacccctncncaacanntttaccnnttttnttttttncctntnttanccggtacacaantnaaanngtcccccaccttancattncctnntctttcnttctttttnnttatnttcacnncaatnatctcntcatgccncnatancctccnnctttanaaatannannncttccncncnccnncatgtgntntnttcntncatnaacatnacactnaatcncnccntnttatttttctctcncncnctctanaannncnttnctntcttatganaatannnnatntnacntananactcttntnctctccntactagtnngttctgctgcccacctcnnnctctn

SEQ ID NO: 140 - DNA, 1405 bp, Homo Sapiens
  misc_feature (801)..(801): n is a, c, g, or t
  misc_feature (806)..(806): n is a, c, g, or t
  misc_feature (811)..(811): n is a, c, g, or t
  misc_feature (843)..(843): n is a, c, g, or t
  misc_feature (904)..(904): n is a, c, g, or t
  misc_feature (916)..(916): n is a, c, g, or t
  misc_feature (946)..(946): n is a, c, g, or t
  misc_feature (953)..(953): n is a, c, g, or t
  misc_feature (975)..(975): n is a, c, g, or t
  misc_feature (977)..(977): n is a, c, g, or t
  misc_feature (991)..(992): n is a, c, g, or t
  misc_feature (1002)..(1002): n is a, c, g, or t
  misc_feature (1009)..(1009): n is a, c, g, or t
  misc_feature (1021)..(1021): n is a, c, g, or t
  misc_feature (1033)..(1033): n is a, c, g, or t
  misc_feature (1038)..(1039): n is a, c, g, or t
  misc_feature (1044)..(1044): n is a, c, g, or t
  misc_feature (1046)..(1046): n is a, c, g, or t
  misc_feature (1055)..(1055): n is a, c, g, or t
  misc_feature (1070)..(1070): n is a, c, g, or t
  misc_feature (1086)..(1086): n is a, c, g, or t
  misc_feature (1109)..(1109): n is a, c, g, or t
  misc_feature (1125)..(1125): n is a, c, g, or t
  misc_feature (1142)..(1142): n is a, c, g, or t
  misc_feature (1147)..(1147): n is a, c, g, or t
  misc_feature (1150)..(1151): n is a, c, g, or t
  misc_feature (1157)..(1157): n is a, c, g, or t
  misc_feature (1159)..(1159): n is a, c, g, or t
  misc_feature (1167)..(1168): n is a, c, g, or t
  misc_feature (1178)..(1178): n is a, c, g, or t
  misc_feature (1180)..(1180): n is a, c, g, or t
  misc_feature (1193)..(1193): n is a, c, g, or t
  misc_feature (1209)..(1209): n is a, c, g, or t
  misc_feature (1212)..(1213): n is a, c, g, or t
  misc_feature (1225)..(1226): n is a, c, g, or t
  misc_feature (1228)..(1228): n is a, c, g, or t
  misc_feature (1252)..(1252): n is a, c, g, or t
  misc_feature (1259)..(1259): n is a, c, g, or t
  misc_feature (1278)..(1278): n is a, c, g, or t
  misc_feature (1286)..(1286): n is a, c, g, or t
  misc_feature (1297)..(1297): n is a, c, g, or t
  misc_feature (1310)..(1310): n is a, c, g, or t
  misc_feature (1312)..(1312): n is a, c, g, or t
  misc_feature (1326)..(1327): n is a, c, g, or t
  misc_feature (1329)..(1329): n is a, c, g, or t
  misc_feature (1333)..(1334): n is a, c, g, or t
  misc_feature (1339)..(1339): n is a, c, g, or t
  misc_feature (1342)..(1343): n is a, c, g, or t
  misc_feature (1350)..(1350): n is a, c, g, or t
  misc_feature (1359)..(1359): n is a, c, g, or t
  misc_feature (1365)..(1365): n is a, c, g, or t
  misc_feature (1376)..(1376): n is a, c, g, or t
  misc_feature (1382)..(1382): n is a, c, g, or t
  misc_feature (1397)..(1397): n is a, c, g, or t
  misc_feature (1399)..(1399): n is a, c, g, or t
  misc_feature (1405)..(1405): n is a, c, g, or t
atagagaaattactatgagaggatcgcatcaccatcaccatcacggatcctatttaggtgacactatagaatcgtcgacccacgcgtccgagatcattgatttcttcctgggggcctctctcaaggatgaggttttgaagattatgccagtgcagaagcagacccgtgccggccagcgcaccaggttcaaggcatttgttgctatcggggactacaatggccacgtcggtctgggtgttaagtgctccaaggaggtggccaccgccatccgtggggccatcatcctggccaagctctccatcgtccccgtgcgcagaggctactgggggaacaagatcggcaagccccacactgtcccttgcaaggtgacaggccgctgcggctctgtgctggtacgcctcatccctgcacccaggggcactggcatcgtctccgcacctgtgcctaagaagctgctcatgatggctggtatcgatgactgctacacctcagcccggggctgcactgccaccctgggcaacttcgccaaggccacctttgatgccatttctaagacctacagctacctgacccccgacctctggaaggagactgtattcaccaagtctccctatcaggagttcactgaccacctcgtcaagacccacaccagagtctccgtgcagcggactcaggctccagctgtggctacaacatagggtttttatacaagaaaaataaagtgaattaagcgtgttactgttaaaaaaaaaaaaaaaagggcggccgctccctatagtgagtcgtattaagcttaattanctgancttgnactcctgttgatagatccagtaatgacctcanaactccatctggaattgtttaaaaacgctcggttgcccccgggcgttttttattgggtganaatccaagctancttggcgaaaattttcaggaactaaggaanctaaaangggaaaaaaaaatccctggaananaccaccgttgaaannatccccaatnggcatcntaaaaaaaaaanttttgaaggcantttcnnccaantngctcaatgnaaccaaaaaacaaancggttcaactggaaantaacggcctttttaaaaaaccgnaaaaaaaaaaaacccnaaattttaatccgggcnttttnttnnaaattntncccccccnnaaaaaagccncncccgaaaatttcnataggcaataaaaaanagnnacccggggaaanngnaaaaaggttccccttttttaaccnttttccnaaaaaaaaaaaaaaatttnttcccctnggaagaaaaanaaaaaatttccgngnttttaaaaaaattnncnaaannggggnttnnaaaaaancccattccnaagggntttaaaaaaantttttnccccacccgggaaantnaatttn

SEQ ID NO: 141 - DNA, 1373 bp, Homo Sapiens
  misc_feature (284)..(284): n is a, c, g, or t
  misc_feature (937)..(937): n is a, c, g, or t
  misc_feature (951)..(951): n is a, c, g, or t
  misc_feature (961)..(961): n is a, c, g, or t
  misc_feature (971)..(971): n is a, c, g, or t
  misc_feature (1010)..(1010): n is a, c, g, or t
  misc_feature (1013)..(1013): n is a, c, g, or t
  misc_feature (1015)..(1015): n is a, c, g, or t
  misc_feature (1019)..(1019): n is a, c, g, or t
  misc_feature (1024)..(1024): n is a, c, g, or t
  misc_feature (1030)..(1030): n is a, c, g, or t
  misc_feature (1039)..(1039): n is a, c, g, or t
  misc_feature (1048)..(1048): n is a, c, g, or t
  misc_feature (1054)..(1054): n is a, c, g, or t
  misc_feature (1060)..(1060): n is a, c, g, or t
  misc_feature (1073)..(1074): n is a, c, g, or t
  misc_feature (1080)..(1081): n is a, c, g, or t
  misc_feature (1086)..(1086): n is a, c, g, or t
  misc_feature (1091)..(1091): n is a, c, g, or t
  misc_feature (1093)..(1094): n is a, c, g, or t
  misc_feature (1097)..(1097): n is a, c, g, or t
  misc_feature (1101)..(1101): n is a, c, g, or t
  misc_feature (1103)..(1103): n is a, c, g, or t
  misc_feature (1112)..(1112): n is a, c, g, or t
  misc_feature (1120)..(1121): n is a, c, g, or t
  misc_feature (1126)..(1126): n is a, c, g, or t
  misc_feature (1136)..(1136): n is a, c, g, or t
  misc_feature (1147)..(1147): n is a, c, g, or t
  misc_feature (1155)..(1155): n is a, c, g, or t
  misc_feature (1161)..(1161): n is a, c, g, or t
  misc_feature (1169)..(1170): n is a, c, g, or t
  misc_feature (1174)..(1174): n is a, c, g, or t
  misc_feature (1178)..(1178): n is a, c, g, or t
  misc_feature (1185)..(1187): n is a, c, g, or t
  misc_feature (1201)..(1201): n is a, c, g, or t
  misc_feature (1212)..(1213): n is a, c, g, or t
  misc_feature (1216)..(1218): n is a, c, g, or t
  misc_feature (1222)..(1222): n is a, c, g, or t
  misc_feature (1224)..(1225): n is a, c, g, or t
  misc_feature (1228)..(1228): n is a, c, g, or t
  misc_feature (1230)..(1230): n is a, c, g, or t
  misc_feature (1234)..(1234): n is a, c, g, or t
  misc_feature (1238)..(1238): n is a, c, g, or t
  misc_feature (1240)..(1241): n is a, c, g, or t
  misc_feature (1243)..(1244): n is a, c, g, or t
  misc_feature (1246)..(1246): n is a, c, g, or t
  misc_feature (1258)..(1259): n is a, c, g, or t
  misc_feature (1261)..(1261): n is a, c, g, or t
  misc_feature (1268)..(1269): n is a, c, g, or t
  misc_feature (1279)..(1279): n is a, c, g, or t
  misc_feature (1283)..(1283): n is a, c, g, or t
  misc_feature (1288)..(1288): n is a, c, g, or t
  misc_feature (1290)..(1290): n is a, c, g, or t
  misc_feature (1295)..(1296): n is a, c, g, or t
  misc_feature (1301)..(1301): n is a, c, g, or t
  misc_feature (1304)..(1304): n is a, c, g, or t
  misc_feature (1310)..(1310): n is a, c, g, or t
  misc_feature (1317)..(1317): n is a, c, g, or t
  misc_feature (1335)..(1335): n is a, c, g, or t
  misc_feature (1340)..(1340): n is a, c, g, or t
  misc_feature (1344)..(1344): n is a, c, g, or t
  misc_feature (1351)..(1351): n is a, c, g, or t
  misc_feature (1353)..(1353): n is a, c, g, or t
  misc_feature (1366)..(1366): n is a, c, g, or t
  misc_feature (1370)..(1370): n is a, c, g, or t
  misc_feature (1373)..(1373): n is a, c, g, or t
aaatagagaaattactatgagaggatcgcatcaccatcaccatcacggatcctatttaggtgacactatagaatcgtcgacccacgcgtccggtagcgcccagggcctgcggggcgcaggagagctggagtcaggcggagaccgcaggctgaccccgcagcggccgggctgtcgcggcccccacctcagggtcttattctgttgctcaggctggagtgcaatggcgcgaacacggctcactgcagtctcgatctcgctggactcagagccactggtggccgcanaagacagtccacgtgtcttaaccaggcttacaagactccaaagatgggtgccttgtatcaagcaggtgctcaacaaatgtctgctgaaaaaatgatgcagggtgcggtggctcacgcaggtaaccatgtgcgaccgaaaggccgtgatcaaaaatgcggacatgtcggaagagatgcaacaggactcggtggagtgcgctactcaggcgctggagaaatacaacatagagaaggacattgcggctcatatcaagaaggaatttgacaagaagtacaatcccacctggcattgcatcgtggggaggaacttcggtagttatgtgacacatgaaaccaaacacttcatctacttctacctgggccaagtggccattcttctgttcaaatctggttaaaagcatggactgtgccacacacccagtgatccatccaaaaacaaggactgcagcctaaattccaaataccagagactgaaattttcagccttgctaagggaacatctcgatgtttgaacctttgttgtgttttgtacagggcattctctgtactagtttgtcgtggttataaaacaattagcagaaatagcctacatttggaatttattttctattccaaaacttctgccccacgtttgtttttctctcaaaatccanttcctttaaaaaanaaatcctgantgcaaatgtnaaaaaaaaaaaaaaaaaaaaaaaagggcggcccctcccntanantgantccgnattaancctttattnaactgaacnttgganctcctntttgaaaaatccnngtaatnnacccnccaancnnccntttngnattttttcnaaaacctnngtttnccccccggcnttttttttttngtgaaaanccaacnttctttgnnaaantttncgggacnnnagaaccttaatggnaaaaaaatccnnggnnntccncnnttnantttnccangnncnncnaaaaaaattttnngntttttcnncttgccaagnaccnaaacnanctttnnggaanttncccccntttttanccctaaaaaaaaacccanttttntcgnctttttntntttttcccccaanaaanccn

SEQ ID NO: 142 - DNA, 1368 bp, Homo Sapiens
  misc_feature (534)..(534): n is a, c, g, or t
  misc_feature (618)..(618): n is a, c, g, or t
  misc_feature (677)..(677): n is a, c, g, or t
  misc_feature (871)..(871): n is a, c, g, or t
  misc_feature (883)..(883): n is a, c, g, or t
  misc_feature (938)..(938): n is a, c, g, or t
  misc_feature (942)..(942): n is a, c, g, or t
  misc_feature (952)..(952): n is a, c, g, or t
  misc_feature (967)..(967): n is a, c, g, or t
  misc_feature (976)..(976): n is a, c, g, or t
  misc_feature (982)..(982): n is a, c, g, or t
  misc_feature (994)..(994): n is a, c, g, or t
  misc_feature (999)..(999): n is a, c, g, or t
  misc_feature (1020)..(1020): n is a, c, g, or t
  misc_feature (1025)..(1025): n is a, c, g, or t
  misc_feature (1028)..(1028): n is a, c, g, or t
  misc_feature (1070)..(1070): n is a, c, g, or t
  misc_feature (1074)..(1074): n is a, c, g, or t
  misc_feature (1080)..(1080): n is a, c, g, or t
  misc_feature (1084)..(1084): n is a, c, g, or t
  misc_feature (1089)..(1089): n is a, c, g, or t
  misc_feature (1096)..(1096): n is a, c, g, or t
  misc_feature (1105)..(1105): n is a, c, g, or t
  misc_feature (1108)..(1108): n is a, c, g, or t
  misc_feature (1111)..(1111): n is a, c, g, or t
  misc_feature (1113)..(1114): n is a, c, g, or t
  misc_feature (1120)..(1120): n is a, c, g, or t
  misc_feature (1137)..(1139): n is a, c, g, or t
  misc_feature (1158)..(1158): n is a, c, g, or t
  misc_feature (1160)..(1160): n is a, c, g, or t
  misc_feature (1177)..(1177): n is a, c, g, or t
  misc_feature (1190)..(1190): n is a, c, g, or t
  misc_feature (1197)..(1198): n is a, c, g, or t
  misc_feature (1214)..(1214): n is a, c, g, or t
  misc_feature (1221)..(1221): n is a, c, g, or t
  misc_feature (1230)..(1231): n is a, c, g, or t
  misc_feature (1236)..(1236): n is a, c, g, or t
  misc_feature (1238)..(1238): n is a, c, g, or t
  misc_feature (1251)..(1251): n is a, c, g, or t
  misc_feature (1254)..(1254): n is a, c, g, or t
  misc_feature (1258)..(1258): n is a, c, g, or t
  misc_feature (1267)..(1267): n is a, c, g, or t
  misc_feature (1276)..(1277): n is a, c, g, or t
  misc_feature (1282)..(1282): n is a, c, g, or t
  misc_feature (1286)..(1286): n is a, c, g, or t
  misc_feature (1290)..(1291): n is a, c, g, or t
  misc_feature (1302)..(1302): n is a, c, g, or t
  misc_feature (1306)..(1306): n is a, c, g, or t
  misc_feature (1310)..(1310): n is a, c, g, or t
  misc_feature (1312)..(1312): n is a, c, g, or t
  misc_feature (1320)..(1321): n is a, c, g, or t
  misc_feature (1323)..(1323): n is a, c, g, or t
  misc_feature (1325)..(1325): n is a, c, g, or t
  misc_feature (1330)..(1330): n is a, c, g, or t
  misc_feature (1338)..(1339): n is a, c, g, or t
  misc_feature (1341)..(1341): n is a, c, g, or t
  misc_feature (1343)..(1343): n is a, c, g, or t
  misc_feature (1349)..(1349): n is a, c, g, or t
  misc_feature (1363)..(1363): n is a, c, g, or t
  misc_feature (1365)..(1366): n is a, c, g, or t
gaattagagaaattactatgagaggatcgcatcaccatcaccatcacggatcctatttaggtgacactatagaatcgtcgacccacgcgtccggtgatattgtagacatcaagggaatgggtactgttcaaaaaggaatgccccacaagtgttaccatggcaaaactggaagagtctacaatgttacccagcatgctgttggcattgttgtaaacaaacaagttaagggcaagattcttgccaagagaattaatgtgcgtattgagcacattaagcactctaagagccgagatagcttcctgaaacgtgtgaaggaaaatgatcagaaaaagaaagaagccaaagagaaaggtacctgggttcaactaaagcgccagcctgctccacccagagaagcacactttgtgagaaccaatgggaaggagcctgagctgctggaacctattccctatgaattcatggcataataggtgttaaaaaaaaaaataaaggacctctgggctacaaaaaaaaaaaaaaaaaaaaaaaaaaaangggcggccgctccctatagtgagtcgtattaagcttaattagctgagcttggactcctgttgatagatccagtaatgacctcanaactccatctggatttgttcagaacgctcggttgccgccgggcgttttttattggtganaatccaagctagcttggcgagattttcaggagctaaggaagctaaaatggagaaaaaaatcactggatataccaccgttgatatatcccaatggcatcgtaaagaacattttgaggcatttcagtcagttgctcaatgtacctataaccagaccgttcagctggatattacggccttttttaaagaccgtaaanaaaaaataagcncaagttttatcccggcctttattcccatttcttgccccccctgaagaatgccccntccngaaatttccntatggcaatgaaaanacgggtgancctggngatatggggaanagtgnttccccccttggttaccccgnttttnccntgaaccaaacttgaaaacgtttttcctcccccctgggagggnaaancccccnaccnatttnccggccngttttctcnccnatntnnttcccnaaaaatgtggccgggtnnncggggaaaaaccctggccntntttccccaaagggtttntttgaaaaaattntttttcnncccccccccacccccngggggantttcccccnnttttnanttaaaccgggccnaangggnaaaattttnttccccccnnttttncccngggnnaaatttttttncccngggncnaaaagggnntnanccccntggaaatnncngnttcccngcccctttggaggncnncc

SEQ ID NO: 143 - DNA, 1243 bp, Homo Sapiens
  misc_feature (681)..(681): n is a, c, g, or t
  misc_feature (699)..(699): n is a, c, g, or t
  misc_feature (723)..(723): n is a, c, g, or t
  misc_feature (729)..(729): n is a, c, g, or t
  misc_feature (731)..(731): n is a, c, g, or t
  misc_feature (735)..(735): n is a, c, g, or t
  misc_feature (739)..(739): n is a, c, g, or t
  misc_feature (741)..(741): n is a, c, g, or t
  misc_feature (743)..(743): n is a, c, g, or t
  misc_feature (746)..(746): n is a, c, g, or t
  misc_feature (749)..(750): n is a, c, g, or t
  misc_feature (752)..(752): n is a, c, g, or t
  misc_feature (755)..(756): n is a, c, g, or t
  misc_feature (758)..(758): n is a, c, g, or t
  misc_feature (762)..(762): n is a, c, g, or t
  misc_feature (774)..(774): n is a, c, g, or t
  misc_feature (778)..(778): n is a, c, g, or t
  misc_feature (794)..(794): n is a, c, g, or t
  misc_feature (796)..(800): n is a, c, g, or t
  misc_feature (802)..(802): n is a, c, g, or t
  misc_feature (807)..(808): n is a, c, g, or t
  misc_feature (814)..(814): n is a, c, g, or t
  misc_feature (816)..(816): n is a, c, g, or t
  misc_feature (820)..(820): n is a, c, g, or t
  misc_feature (823)..(823): n is a, c, g, or t
  misc_feature (825)..(834): n is a, c, g, or t
  misc_feature (836)..(836): n is a, c, g, or t
  misc_feature (839)..(839): n is a, c, g, or t
  misc_feature (842)..(842): n is a, c, g, or t
  misc_feature (844)..(846): n is a, c, g, or t
  misc_feature (848)..(848): n is a, c, g, or t
  misc_feature (851)..(851): n is a, c, g, or t
  misc_feature (854)..(856): n is a, c, g, or t
  misc_feature (860)..(862): n is a, c, g, or t
  misc_feature (870)..(872): n is a, c, g, or t
  misc_feature (875)..(882): n is a, c, g, or t
  misc_feature (885)..(887): n is a, c, g, or t
  misc_feature (889)..(889): n is a, c, g, or t
  misc_feature (891)..(891): n is a, c, g, or t
  misc_feature (893)..(897): n is a, c, g, or t
  misc_feature (900)..(910): n is a, c, g, or t
  misc_feature (913)..(916): n is a, c, g, or t
  misc_feature (918)..(920): n is a, c, g, or t
  misc_feature (923)..(943): n is a, c, g, or t
  misc_feature (947)..(964): n is a, c, g, or t
  misc_feature (966)..(997): n is a, c, g, or t
  misc_feature (999)..(1016): n is a, c, g, or t
  misc_feature (1018)..(1243): n is a, c, g, or t
gagaaattactagagaggatcgcatcaccatcaccattcacggatcctatttaggtgacactatagaatcgtcgacccacgcgtccggggacttgggggtcttcccagcaacatcagctctgtcagctccttgctgcttttcaacaccaccgagaacctgtagaagaagtatgtcttcctggaccccctctgcccctggcaccattccagaactgcccaccttccacactgaggtagccgagcctctcaaggcagacctacaagatggggtactaacaccacccccaccgcccccaccaccacccccagctcctgaggtgctggccagtgcacccccactcccaccctcaaccgcggcccctgtaggccaaggcgccaggcaggacgacagcagcagcagcacgtctccttcagtccagggagctcccagggaagtggtcgacccctccggtggctgggccactctgctagagtccatccgccaagctgggggcatcggcaaggccaagctgcgcagcatgaaggagcgaaagctggagaagaagaagcagaaggagcaggagcaagtgagagccacgagccaaggtgggcacttgatgtcggatctcttcaacaagctggtcatgaggcgcaagggcatctctgggaaaggacctggggctggtgaggggcccggaggancctttgcccgcgtgtcanactccatccctcctgtgcccccancgcaananccanaggnanangangannangannantggnaatcctaggggntccntgaaccttccccccanannnnnanttggnntgttgntntgantgnannnnnnnnnnanaantgntnnnantgnttnnntggnnnggggtgannnaannnnnnnntgnnngnanannnnnttnnnnnnnnnnnaannnngnnnttnnnnnnnnnnnnnnnnnnnnnattnnnnnnnnnnnnnnnnnngnnnnnnnnnnnnnnnnnnnnnnnnnnnnnnnntnnnnnnnnnnnnnnnnnnannnnnnnnnnnnnnnnnnnnnnnnnnnnnnnnnnnnnnnnnnnnnnnnnnnnnnnnnnnnnnnnnnnnnnnnnnnnnnnnnnnnnnnnnnnnnnnnnnnnnnnnnnnnnnnnnnnnnnnnnnnnnnnnnnnnnnnnnnnnnnnnnnnnnnnnnnnnnnnnnnnnnnnnnnnnnnnnnnnnnnnnnnnnnnnnnnnnnnnnnnnnnnnnnnnnnnnnnnnnnnnnnn

SEQ ID NO: 144 - DNA, 1364 bp, Homo Sapiens
  misc_feature (2)..(2): n is a, c, g, or t
  misc_feature (753)..(753): n is a, c, g, or t
  misc_feature (777)..(777): n is a, c, g, or t
  misc_feature (816)..(816): n is a, c, g, or t
  misc_feature (833)..(833): n is a, c, g, or t
  misc_feature (864)..(864): n is a, c, g, or t
  misc_feature (868)..(868): n is a, c, g, or t
  misc_feature (874)..(874): n is a, c, g, or t
  misc_feature (876)..(876): n is a, c, g, or t
  misc_feature (878)..(878): n is a, c, g, or t
  misc_feature (883)..(883): n is a, c, g, or t
  misc_feature (889)..(889): n is a, c, g, or t
  misc_feature (898)..(898): n is a, c, g, or t
  misc_feature (917)..(917): n is a, c, g, or t
  misc_feature (920)..(920): n is a, c, g, or t
  misc_feature (928)..(928): n is a, c, g, or t
  misc_feature (932)..(933): n is a, c, g, or t
  misc_feature (935)..(935): n is a, c, g, or t
  misc_feature (939)..(939): n is a, c, g, or t
  misc_feature (946)..(947): n is a, c, g, or t
  misc_feature (951)..(951): n is a, c, g, or t
  misc_feature (954)..(954): n is a, c, g, or t
  misc_feature (958)..(959): n is a, c, g, or t
  misc_feature (963)..(964): n is a, c, g, or t
  misc_feature (971)..(971): n is a, c, g, or t
  misc_feature (977)..(977): n is a, c, g, or t
  misc_feature (990)..(991): n is a, c, g, or t
  misc_feature (993)..(993): n is a, c, g, or t
  misc_feature (1004)..(1004): n is a, c, g, or t
  misc_feature (1007)..(1007): n is a, c, g, or t
  misc_feature (1010)..(1011): n is a, c, g, or t
  misc_feature (1013)..(1013): n is a, c, g, or t
  misc_feature (1030)..(1030): n is a, c, g, or t
  misc_feature (1033)..(1034): n is a, c, g, or t
  misc_feature (1036)..(1036): n is a, c, g, or t
  misc_feature (1038)..(1038): n is a, c, g, or t
  misc_feature (1044)..(1044): n is a, c, g, or t
  misc_feature (1062)..(1063): n is a, c, g, or t
  misc_feature (1067)..(1067): n is a, c, g, or t
  misc_feature (1073)..(1073): n is a, c, g, or t
  misc_feature (1077)..(1077): n is a, c, g, or t
  misc_feature (1083)..(1084): n is a, c, g, or t
  misc_feature (1089)..(1090): n is a, c, g, or t
  misc_feature (1093)..(1095): n is a, c, g, or t
  misc_feature (1098)..(1098): n is a, c, g, or t
  misc_feature (1102)..(1102): n is a, c, g, or t
  misc_feature (1105)..(1106): n is a, c, g, or t
  misc_feature (1108)..(1109): n is a, c, g, or t
  misc_feature (1112)..(1112): n is a, c, g, or t
  misc_feature (1115)..(1115): n is a, c, g, or t
  misc_feature (1123)..(1123): n is a, c, g, or t
  misc_feature (1131)..(1131): n is a, c, g, or t
  misc_feature (1140)..(1140): n is a, c, g, or t
  misc_feature (1143)..(1143): n is a, c, g, or t
  misc_feature (1148)..(1149): n is a, c, g, or t
  misc_feature (1153)..(1155): n is a, c, g, or t
  misc_feature (1158)..(1159): n is a, c, g, or t
  misc_feature (1166)..(1169): n is a, c, g, or t
  misc_feature (1172)..(1172): n is a, c, g, or t
  misc_feature (1174)..(1174): n is a, c, g, or t
  misc_feature (1176)..(1178): n is a, c, g, or t
  misc_feature (1181)..(1184): n is a, c, g, or t
  misc_feature (1188)..(1190): n is a, c, g, or t
  misc_feature (1192)..(1192): n is a, c, g, or t
  misc_feature (1194)..(1194): n is a, c, g, or t
  misc_feature (1200)..(1200): n is a, c, g, or t
  misc_feature (1203)..(1203): n is a, c, g, or t
  misc_feature (1207)..(1208): n is a, c, g, or t
  misc_feature (1212)..(1212): n is a, c, g, or t
  misc_feature (1214)..(1217): n is a, c, g, or t
  misc_feature (1221)..(1221): n is a, c, g, or t
  misc_feature (1226)..(1227): n is a, c, g, or t
  misc_feature (1237)..(1240): n is a, c, g, or t
  misc_feature (1243)..(1243): n is a, c, g, or t
  misc_feature (1252)..(1252): n is a, c, g, or t
  misc_feature (1258)..(1259): n is a, c, g, or t
  misc_feature (1262)..(1263): n is a, c, g, or t
  misc_feature (1267)..(1272): n is a, c, g, or t
  misc_feature (1275)..(1275): n is a, c, g, or t
  misc_feature (1278)..(1279): n is a, c, g, or t
  misc_feature (1283)..(1297): n is a, c, g, or t
  misc_feature (1303)..(1305): n is a, c, g, or t
  misc_feature (1307)..(1309): n is a, c, g, or t
  misc_feature (1312)..(1312): n is a, c, g, or t
  misc_feature (1316)..(1319): n is a, c, g, or t
  misc_feature (1323)..(1324): n is a, c, g, or t
  misc_feature (1330)..(1330): n is a, c, g, or t
  misc_feature (1335)..(1335): n is a, c, g, or t
  misc_feature (1343)..(1343): n is a, c, g, or t
  misc_feature (1348)..(1355): n is a, c, g, or t
  misc_feature (1358)..(1360): n is a, c, g, or t
  misc_feature (1363)..(1363): n is a, c, g, or t
anagagaaattactatgagaggatcgcatcaccatcaccatcacggatcctatttaggtgacactatagaatcgtcgacccacgcgtccggtggttcccaaagatgtcaatgctgccattgccaccatcaagaccaagcgtaccatccagtttgtggattggtgccccactggcttcaaggttggcatcaactaccagcctcccactgtggtgcctggtggagacctggccaaggtacagagagctgtgtgcatgctgagcaacaccacagccattgctgaggcctgggctcgcctggaccacaagtttgacctgatgtatgccaaacgtgcctttgttcactggtacgttggggaggggatggaggaaggtgagttttcagaggcccgtgaggacatggctgcccttgagaaggattatgaggaggttggtgtggattctgttgaaggagagggtgaggaagaaggagaggaatactaaagttaaaacgtcacaaaggtgctgcttttacagggaagcttattctgttttaaacattgaaaagttgtggtctgatcagttaatttgtatgtagcagtgtatgctctcatatacaattactgacctatgctctaaaacatgaatgctttgttacagacccaagctgtccatttctgtgatgggttttgaataaagtattccctgtcttaaaaaaaaaaaaaaaaaaaaaaagggcggccgctccctatagtgagtcgtattaagcttaattanctgagcttggactcctgttgatanatccagtaatgacctcaaaactccatctggatttgttcnaaaaccctcggttgccncccgggcgttttttattggtgaaaatccaanctancttggncnanatttncagganctaaggaanctaaaatggaaaaaaaaantcnctggaaanaccnncngttnaaaatanncccnaanggcnntccnnaaaaaanattttngaagcattttcanncntttgccccaangtnccnnanaacccaaaaaccgttcnacnngnanataacngccctttttaaaaacccnnaaanaaaaanaaanccccannttttnnccnnnccntttnttnncnnttnttncccccccnaaaaaagnccccccccnaantttcnnaagnnnaannaaaaaannnnaancngnnnaannnnaaannntncncccttnttncccnntttncnnnnaaantaaannttttcccccnnnnaanaaaaccccnaaattnnccnntttnnnnnntantcnnaaannnnnnnnnnnnnnnaaaacnnncnnnttnccannnntttnnaaaaanttttncccccccnccccnnnnnnnnccnnnttnt

SEQ ID NO: 145 - DNA, 1322 bp, Homo Sapiens
  misc_feature (1)..(1): n is a, c, g, or t
  misc_feature (6)..(6): n is a, c, g, or t
  misc_feature (582)..(582): n is a, c, g, or t
  misc_feature (599)..(599): n is a, c, g, or t
  misc_feature (623)..(623): n is a, c, g, or t
  misc_feature (626)..(626): n is a, c, g, or t
  misc_feature (727)..(727): n is a, c, g, or t
  misc_feature (762)..(762): n is a, c, g, or t
  misc_feature (767)..(767): n is a, c, g, or t
  misc_feature (771)..(771): n is a, c, g, or t
  misc_feature (785)..(785): n is a, c, g, or t
  misc_feature (788)..(788): n is a, c, g, or t
  misc_feature (790)..(790): n is a, c, g, or t
  misc_feature (802)..(802): n is a, c, g, or t
  misc_feature (804)..(804): n is a, c, g, or t
  misc_feature (808)..(808): n is a, c, g, or t
  misc_feature (814)..(814): n is a, c, g, or t
  misc_feature (820)..(820): n is a, c, g, or t
  misc_feature (826)..(826): n is a, c, g, or t
  misc_feature (829)..(829): n is a, c, g, or t
  misc_feature (832)..(832): n is a, c, g, or t
  misc_feature (837)..(837): n is a, c, g, or t
  misc_feature (842)..(842): n is a, c, g, or t
  misc_feature (847)..(847): n is a, c, g, or t
  misc_feature (864)..(864): n is a, c, g, or t
  misc_feature (866)..(866): n is a, c, g, or t
  misc_feature (868)..(868): n is a, c, g, or t
  misc_feature (893)..(893): n is a, c, g, or t
  misc_feature (898)..(898): n is a, c, g, or t
  misc_feature (900)..(900): n is a, c, g, or t
  misc_feature (902)..(902): n is a, c, g, or t
  misc_feature (904)..(905): n is a, c, g, or t
  misc_feature (911)..(911): n is a, c, g, or t
  misc_feature (914)..(916): n is a, c, g, or t
  misc_feature (919)..(919): n is a, c, g, or t
  misc_feature (923)..(923): n is a, c, g, or t
  misc_feature (930)..(930): n is a, c, g, or t
  misc_feature (932)..(932): n is a, c, g, or t
  misc_feature (937)..(937): n is a, c, g, or t
  misc_feature (940)..(940): n is a, c, g, or t
  misc_feature (945)..(945): n is a, c, g, or t
  misc_feature (955)..(955): n is a, c, g, or t
  misc_feature (962)..(962): n is a, c, g, or t
  misc_feature (964)..(964): n is a, c, g, or t
  misc_feature (967)..(967): n is a, c, g, or t
  misc_feature (973)..(973): n is a, c, g, or t
  misc_feature (979)..(980): n is a, c, g, or t
  misc_feature (986)..(988): n is a, c, g, or t
  misc_feature (997)..(997): n is a, c, g, or t
  misc_feature (1002)..(1002): n is a, c, g, or t
  misc_feature (1005)..(1006): n is a, c, g, or t
  misc_feature (1013)..(1013): n is a, c, g, or t
  misc_feature (1023)..(1023): n is a, c, g, or t
  misc_feature (1026)..(1026): n is a, c, g, or t
  misc_feature (1032)..(1032): n is a, c, g, or t
  misc_feature (1050)..(1052): n is a, c, g, or t
  misc_feature (1065)..(1065): n is a, c, g, or t
  misc_feature (1070)..(1070): n is a, c, g, or t
  misc_feature (1084)..(1084): n is a, c, g, or t
  misc_feature (1086)..(1086): n is a, c, g, or t
  misc_feature (1107)..(1107): n is a, c, g, or t
  misc_feature (1110)..(1110): n is a, c, g, or t
  misc_feature (1119)..(1119): n is a, c, g, or t
  misc_feature (1123)..(1123): n is a, c, g, or t
  misc_feature (1125)..(1125): n is a, c, g, or t
  misc_feature (1133)..(1136): n is a, c, g, or t
  misc_feature (1138)..(1138): n is a, c, g, or t
  misc_feature (1145)..(1145): n is a, c, g, or t
  misc_feature (1154)..(1155): n is a, c, g, or t
  misc_feature (1164)..(1165): n is a, c, g, or t
  misc_feature (1183)..(1183): n is a, c, g, or t
  misc_feature (1189)..(1189): n is a, c, g, or t
  misc_feature (1216)..(1216): n is a, c, g, or t
  misc_feature (1222)..(1223): n is a, c, g, or t
  misc_feature (1226)..(1227): n is a, c, g, or t
  misc_feature (1235)..(1235): n is a, c, g, or t
  misc_feature (1238)..(1238): n is a, c, g, or t
  misc_feature (1245)..(1245): n is a, c, g, or t
  misc_feature (1250)..(1250): n is a, c, g, or t
  misc_feature (1252)..(1253): n is a, c, g, or t
  misc_feature (1255)..(1255): n is a, c, g, or t
  misc_feature (1262)..(1262): n is a, c, g, or t
  misc_feature (1264)..(1264): n is a, c, g, or t
  misc_feature (1269)..(1270): n is a, c, g, or t
  misc_feature (1276)..(1276): n is a, c, g, or t
  misc_feature (1278)..(1279): n is a, c, g, or t
  misc_feature (1298)..(1298): n is a, c, g, or t
  misc_feature (1300)..(1301): n is a, c, g, or t
  misc_feature (1307)..(1309): n is a, c, g, or t
  misc_feature (1311)..(1311): n is a, c, g, or t
  misc_feature (1317)..(1317): n is a, c, g, or t
  misc_feature (1320)..(1320): n is a, c, g, or t
  misc_feature (1322)..(1322): n is a, c, g, or t
naattngagaaattactatgagaggatcgcatcaccatcaccatcacggatcctatttaggtgacactatagaatcgtcgacccacgcgtccgggtgctggccctgcccacgcctagggctccggcgcgtcacgggcctcagctgggattcccgcgcccctcggacggccacgagactcggacatctttccaggaacagcgtgaggaggacagaagcacccaacaggactgctcaagccacctgcgaacactgctgctaccatgcccaagagaaaggcaaaaggagatgctaaaggtgataaagcaaaggtgaaggatgagccacagaggagatcagctcggttgtctgctaaaccagctcctccaaaaccagagcccaggcctaaaaaggcctctgcaaagaagggagagaagcttcccaaagggagaaaggggaaagcagatgctggaaaggatggaaacaaccctgcaaaaaaccgagatgcctctacactccagtcccagaaagcggaaggcactggggatgccaagtgaaatgtacattttttgagagctctgtacttatagtgactctactgtttngaaatactatttttttnaattcaagttttataaaagtgtanaantttggcttttttaagttatgttgttagcacacaggacacttccttgttgtctttttgtggaagggcaagtaccactaatagggtgtatctcaaaaactganttgaaataagggaaaataggattttctgtcctggnttttngaanattgttcttgattnccntngattcccaggananattntctganatttcncgtgtncanccnctttnggacnggaancctttaagtgtgggggnancnaaaattttttgtctcctcttttccngatgncntnannataaanttnnnttncttnaaccgananttttnttngggcnttggcaaccntaaaatncnctntggttngggaannaaaacnnngggtttttnttttnaanntcccaantggggttccnttnaaaaanccaaaattcccgtttttnnntttggggaattcncccgnggggtttttttttnanccccccccgggcaaaaggggnccngaaaaaaantttnancttgcccnnnngngaaggtntcccccccnnttttaaaanntttttttttttaaaaaanaaaaanaaatttttttttattttttttggggantttttnnggnngggggttnggnaattttnaaaangnntnaaaattntnccccnntttccncnnaaaaaatttttttttaaantnntttaannngnaaaaanttntn

SEQ ID NO: 146 - DNA, 1345 bp, Homo Sapiens
  misc_feature (737)..(737): n is a, c, g, or t
  misc_feature (764)..(764): n is a, c, g, or t
  misc_feature (787)..(787): n is a, c, g, or t
  misc_feature (820)..(820): n is a, c, g, or t
  misc_feature (829)..(829): n is a, c, g, or t
  misc_feature (831)..(833): n is a, c, g, or t
  misc_feature (846)..(846): n is a, c, g, or t
  misc_feature (852)..(852): n is a, c, g, or t
  misc_feature (857)..(857): n is a, c, g, or t
  misc_feature (862)..(862): n is a, c, g, or t
  misc_feature (867)..(867): n is a, c, g, or t
  misc_feature (871)..(872): n is a, c, g, or t
  misc_feature (876)..(876): n is a, c, g, or t
  misc_feature (878)..(879): n is a, c, g, or t
  misc_feature (882)..(882): n is a, c, g, or t
  misc_feature (900)..(900): n is a, c, g, or t
  misc_feature (913)..(913): n is a, c, g, or t
  misc_feature (916)..(916): n is a, c, g, or t
  misc_feature (918)..(918): n is a, c, g, or t
  misc_feature (923)..(923): n is a, c, g, or t
  misc_feature (930)..(930): n is a, c, g, or t
  misc_feature (933)..(933): n is a, c, g, or t
  misc_feature (937)..(937): n is a, c, g, or t
  misc_feature (940)..(940): n is a, c, g, or t
  misc_feature (942)..(945): n is a, c, g, or t
  misc_feature (947)..(949): n is a, c, g, or t
  misc_feature (953)..(953): n is a, c, g, or t
  misc_feature (960)..(960): n is a, c, g, or t
  misc_feature (962)..(964): n is a, c, g, or t
  misc_feature (977)..(977): n is a, c, g, or t
  misc_feature (979)..(979): n is a, c, g, or t
  misc_feature (986)..(988): n is a, c, g, or t
  misc_feature (990)..(990): n is a, c, g, or t
  misc_feature (992)..(993): n is a, c, g, or t
  misc_feature (995)..(995): n is a, c, g, or t
  misc_feature (998)..(999): n is a, c, g, or t
  misc_feature (1002)..(1005): n is a, c, g, or t
  misc_feature (1008)..(1008): n is a, c, g, or t
  misc_feature (1010)..(1012): n is a, c, g, or t
  misc_feature (1015)..(1015): n is a, c, g, or t
  misc_feature (1017)..(1022): n is a, c, g, or t
  misc_feature (1028)..(1028): n is a, c, g, or t
  misc_feature (1034)..(1035): n is a, c, g, or t
  misc_feature (1037)..(1038): n is a, c, g, or t
  misc_feature (1043)..(1047): n is a, c, g, or t
  misc_feature (1051)..(1051): n is a, c, g, or t
  misc_feature (1054)..(1057): n is a, c, g, or t
  misc_feature (1059)..(1059): n is a, c, g, or t
  misc_feature (1061)..(1063): n is a, c, g, or t
  misc_feature (1066)..(1067): n is a, c, g, or t
  misc_feature (1069)..(1071): n is a, c, g, or t
  misc_feature (1076)..(1076): n is a, c, g, or t
  misc_feature (1078)..(1078): n is a, c, g, or t
  misc_feature (1083)..(1084): n is a, c, g, or t
  misc_feature (1087)..(1087): n is a, c, g, or t
  misc_feature (1092)..(1093): n is a, c, g, or t
  misc_feature (1095)..(1101): n is a, c, g, or t
  misc_feature (1106)..(1107): n is a, c, g, or t
  misc_feature (1128)..(1129): n is a, c, g, or t
  misc_feature (1133)..(1135): n is a, c, g, or t
  misc_feature (1138)..(1138): n is a, c, g, or t
  misc_feature (1144)..(1147): n is a, c, g, or t
  misc_feature (1149)..(1150): n is a, c, g, or t
  misc_feature (1160)..(1165): n is a, c, g, or t
  misc_feature (1167)..(1167): n is a, c, g, or t
  misc_feature (1172)..(1173): n is a, c, g, or t
  misc_feature (1179)..(1181): n is a, c, g, or t
  misc_feature (1187)..(1189): n is a, c, g, or t
  misc_feature (1191)..(1192): n is a, c, g, or t
  misc_feature (1196)..(1197): n is a, c, g, or t
  misc_feature (1199)..(1199): n is a, c, g, or t
  misc_feature (1201)..(1201): n is a, c, g, or t
  misc_feature (1203)..(1203): n is a, c, g, or t
  misc_feature (1206)..(1208): n is a, c, g, or t
  misc_feature (1211)..(1217): n is a, c, g, or t
  misc_feature (1219)..(1219): n is a, c, g, or t
  misc_feature (1224)..(1224): n is a, c, g, or t
  misc_feature (1230)..(1231): n is a, c, g, or t
  misc_feature (1246)..(1248): n is a, c, g, or t
  misc_feature (1250)..(1251): n is a, c, g, or t
  misc_feature (1254)..(1257): n is a, c, g, or t
  misc_feature (1265)..(1266): n is a, c, g, or t
  misc_feature (1268)..(1268): n is a, c, g, or t
  misc_feature (1270)..(1272): n is a, c, g, or t
  misc_feature (1274)..(1275): n is a, c, g, or t
  misc_feature (1279)..(1279): n is a, c, g, or t
  misc_feature (1281)..(1281): n is a, c, g, or t
  misc_feature (1283)..(1285): n is a, c, g, or t
  misc_feature (1287)..(1287): n is a, c, g, or t
  misc_feature (1289)..(1289): n is a, c, g, or t
  misc_feature (1294)..(1295): n is a, c, g, or t
  misc_feature (1299)..(1302): n is a, c, g, or t
  misc_feature (1304)..(1314): n is a, c, g, or t
  misc_feature (1320)..(1320): n is a, c, g, or t
  misc_feature (1322)..(1322): n is a, c, g, or t
  misc_feature (1324)..(1324): n is a, c, g, or t
  misc_feature (1326)..(1326): n is a, c, g, or t
  misc_feature (1328)..(1333): n is a, c, g, or t
  misc_feature (1335)..(1338): n is a, c, g, or t
  misc_feature (1343)..(1344): n is a, c, g, or t
gatagagagattactatgagaggatcgcatcaccatcaccatcacggatcctatttaggtgacactatagaatcgtcgacccacgcgtccggggtcacaacggggtcagaagcatgcggggggtcagggcagagcccgcgtgacccccaaagtagtcccctgtcgctcatcgccaggttctcgccgatcgccatcgatggtatgagcggcctggcgggcgtgggcctgtcggggggcgcggcgggcgccggctggtgcatcttcgtgtacaacctgtcaccggaggcagacgagagcgtgctgtggcagctgttcgggccttttggggcagtcaccaacgtcaaggtcatccgtgatttcaccaccaacaagtgcaagggtttcggcttcgtgaccatgaccaactatgacgaggcggccatggccatcgccagcctgaacggctatcgcctgggcgagcgcgtgctgcaggtctccttcaagaccagcaaacagcacaaggcgtgagcccaccccgcctgccctcccaccccctccccgggcagcagagagagagagagagaaagagagagagagagagagaaggggcccaagagagacagcacaggcagccccacggacgacgcgagggccccacgtccctgcggaagccacagggtgagcactctggggtgggagggtctgcagggaattgggggggtgcccggggatcccccgccccatcctcctgcccccanccccaggctgggctgttcactctctcntcttggtttggttcatggtgaangttttttgttttctttttttcggctaaaaaaantgcaaaaantnnnccccaacccccanccttcnaacanccccnaatgnaatnncttngnnggnttccaagggggtgccctnccaaacccccttnccnanccttncccaaanaantaantgngnnnngnnntaanaaaaaanannntttaaaaaatccncnaaaaaannnancnntnaannaannnnttngnnntcncnnnnnnaaattncccctnntnnaaatnnnnntaanaannnntntnnnttnnannnaaaantnaattnnaanaaaanngnnnnnnnaaagnnaaaaaaatctctttttttttnnaaannnaanaaaaannnntnnaaaattttannnnnntnttttnnattttnnnaaaaannntnnaaannanananaannnaannnnnnncntcccntataannttataaatttaatannnanntannnntttttaannantnnnannattnanannntntnttttnnaaannnntnnnnnnnnnnntttttntnananannnnnnannnnatttnna

SEQ ID NO: 147 - DNA, 1454 bp, Homo Sapiens
  misc_feature (13)..(13): n is a, c, g, or t
  misc_feature (59)..(59): n is a, c, g, or t
  misc_feature (459)..(459): n is a, c, g, or t
  misc_feature (467)..(467): n is a, c, g, or t
  misc_feature (603)..(603): n is a, c, g, or t
  misc_feature (639)..(639): n is a, c, g, or t
  misc_feature (664)..(664): n is a, c, g, or t
  misc_feature (682)..(682): n is a, c, g, or t
  misc_feature (727)..(727): n is a, c, g, or t
  misc_feature (755)..(755): n is a, c, g, or t
  misc_feature (758)..(758): n is a, c, g, or t
  misc_feature (771)..(772): n is a, c, g, or t
  misc_feature (775)..(775): n is a, c, g, or t
  misc_feature (784)..(784): n is a, c, g, or t
  misc_feature (798)..(798): n is a, c, g, or t
  misc_feature (813)..(813): n is a, c, g, or t
  misc_feature (833)..(835): n is a, c, g, or t
  misc_feature (839)..(839): n is a, c, g, or t
  misc_feature (842)..(842): n is a, c, g, or t
  misc_feature (848)..(848): n is a, c, g, or t
  misc_feature (858)..(858): n is a, c, g, or t
  misc_feature (865)..(865): n is a, c, g, or t
  misc_feature (869)..(869): n is a, c, g, or t
  misc_feature (873)..(873): n is a, c, g, or t
  misc_feature (881)..(881): n is a, c, g, or t
  misc_feature (891)..(891): n is a, c, g, or t
  misc_feature (895)..(895): n is a, c, g, or t
  misc_feature (926)..(926): n is a, c, g, or t
  misc_feature (930)..(930): n is a, c, g, or t
  misc_feature (946)..(946): n is a, c, g, or t
  misc_feature (948)..(948): n is a, c, g, or t
  misc_feature (953)..(953): n is a, c, g, or t
  misc_feature (962)..(962): n is a, c, g, or t
  misc_feature (966)..(966): n is a, c, g, or t
  misc_feature (969)..(969): n is a, c, g, or t
  misc_feature (972)..(973): n is a, c, g, or t
  misc_feature (975)..(975): n is a, c, g, or t
  misc_feature (977)..(977): n is a, c, g, or t
  misc_feature (985)..(985): n is a, c, g, or t
  misc_feature (988)..(988): n is a, c, g, or t
  misc_feature (993)..(993): n is a, c, g, or t
  misc_feature (1001)..(1002): n is a, c, g, or t
  misc_feature (1004)..(1005): n is a, c, g, or t
  misc_feature (1008)..(1008): n is a, c, g, or t
  misc_feature (1011)..(1011): n is a, c, g, or t
  misc_feature (1016)..(1016): n is a, c, g, or t
  misc_feature (1025)..(1026): n is a, c, g, or t
  misc_feature (1030)..(1030): n is a, c, g, or t
  misc_feature (1033)..(1033): n is a, c, g, or t
  misc_feature (1040)..(1040): n is a, c, g, or t
  misc_feature (1049)..(1051): n is a, c, g, or t
  misc_feature (1053)..(1053): n is a, c, g, or t
  misc_feature (1057)..(1057): n is a, c, g, or t
  misc_feature (1060)..(1062): n is a, c, g, or t
  misc_feature (1075)..(1075): n is a, c, g, or t
  misc_feature (1078)..(1079): n is a, c, g, or t
  misc_feature (1082)..(1082): n is a, c, g, or t
  misc_feature (1086)..(1086): n is a, c, g, or t
  misc_feature (1088)..(1088): n is a, c, g, or t
  misc_feature (1096)..(1097): n is a, c, g, or t
  misc_feature (1100)..(1101): n is a, c, g, or t
  misc_feature (1107)..(1107): n is a, c, g, or t
  misc_feature (1114)..(1115): n is a, c, g, or t
  misc_feature (1118)..(1118): n is a, c, g, or t
  misc_feature (1123)..(1124): n is a, c, g, or t
  misc_feature (1128)..(1128): n is a, c, g, or t
  misc_feature (1134)..(1134): n is a, c, g, or t
  misc_feature (1141)..(1142): n is a, c, g, or t
  misc_feature (1146)..(1147): n is a, c, g, or t
  misc_feature (1149)..(1149): n is a, c, g, or t
  misc_feature (1152)..(1152): n is a, c, g, or t
  misc_feature (1155)..(1157): n is a, c, g, or t
  misc_feature (1164)..(1164): n is a, c, g, or t
  misc_feature (1173)..(1173): n is a, c, g, or t
  misc_feature (1175)..(1177): n is a, c, g, or t
  misc_feature (1182)..(1182): n is a, c, g, or t
  misc_feature (1185)..(1186): n is a, c, g, or t
  misc_feature (1194)..(1194): n is a, c, g, or t
  misc_feature (1196)..(1196): n is a, c, g, or t
  misc_feature (1201)..(1202): n is a, c, g, or t
  misc_feature (1205)..(1205): n is a, c, g, or t
  misc_feature (1209)..(1209): n is a, c, g, or t
  misc_feature (1216)..(1216): n is a, c, g, or t
  misc_feature (1219)..(1219): n is a, c, g, or t
  misc_feature (1223)..(1223): n is a, c, g, or t
  misc_feature (1225)..(1225): n is a, c, g, or t
  misc_feature (1229)..(1230): n is a, c, g, or t
  misc_feature (1237)..(1237): n is a, c, g, or t
  misc_feature (1240)..(1240): n is a, c, g, or t
  misc_feature (1251)..(1251): n is a, c, g, or t
  misc_feature (1255)..(1257): n is a, c, g, or t
  misc_feature (1269)..(1269): n is a, c, g, or t
  misc_feature (1272)..(1272): n is a, c, g, or t
  misc_feature (1274)..(1275): n is a, c, g, or t
  misc_feature (1286)..(1286): n is a, c, g, or t
  misc_feature (1290)..(1290): n is a, c, g, or t
  misc_feature (1292)..(1292): n is a, c, g, or t
  misc_feature (1295)..(1296): n is a, c, g, or t
  misc_feature (1298)..(1298): n is a, c, g, or t
  misc_feature (1300)..(1300): n is a, c, g, or t
  misc_feature (1306)..(1307): n is a, c, g, or t
  misc_feature (1311)..(1313): n is a, c, g, or t
  misc_feature (1315)..(1315): n is a, c, g, or t
  misc_feature (1318)..(1318): n is a, c, g, or t
  misc_feature (1322)..(1323): n is a, c, g, or t
  misc_feature (1325)..(1325): n is a, c, g, or t
  misc_feature (1331)..(1331): n is a, c, g, or t
  misc_feature (1333)..(1333): n is a, c, g, or t
  misc_feature (1345)..(1345): n is a, c, g, or t
  misc_feature (1350)..(1350): n is a, c, g, or t
  misc_feature (1354)..(1355): n is a, c, g, or t
  misc_feature (1358)..(1358): n is a, c, g, or t
  misc_feature (1368)..(1370): n is a, c, g, or t
  misc_feature (1374)..(1375): n is a, c, g, or t
  misc_feature (1386)..(1387): n is a, c, g, or t
  misc_feature (1391)..(1391): n is a, c, g, or t
  misc_feature (1398)..(1398): n is a, c, g, or t
  misc_feature (1403)..(1403): n is a, c, g, or t
  misc_feature (1405)..(1405): n is a, c, g, or t
  misc_feature (1407)..(1407): n is a, c, g, or t
  misc_feature (1413)..(1413): n is a, c, g, or t
  misc_feature (1417)..(1417): n is a, c, g, or t
  misc_feature (1429)..(1432): n is a, c, g, or t
  misc_feature (1435)..(1436): n is a, c, g, or t
  misc_feature (1448)..(1448): n is a, c, g, or t
aagaggaaattanctatgagaggatcgcatcaccatcaccatcacgggatcctatttangtgacactatagaatcgtcgacccacgcgtccggggggaatttgtcctgtaaaatagacttccagagctcttttgccccctctgctcccatgcaccctccccttccaagtcctttagcaaggcctggatgtttagggagaaagtggtccaaggctgctgacaagagggaccaaagggggtgctgggttcccagggagcagggatgtttaattactatgtcatgtgcaatgttgttttaggccaacccttgccccaagcccagtctcttctccctccccaccatgtccagacctcccaaatggttcttgtgcatctgttggagaagtcaagggagtagggagaagggccccaaggatgggcccaggttaggtgaagagtaagatgtgagctgaactcctcnaactgaanagacccacacttggtcacattctctcacgctgccttcaggatccccagcccccaactcttcttcctgaggatggaaatccactccagccccactaggactgatgtgggtgccatacaggcaggagcagcccaccangaaagtgtaaggagggagctgaactccccagagtanctggaccacaagagacttgggtcanagctgatttcaaccccanaattgtctctcgggttcaccctactcttctgaaaatgaaaatttntttggggcccttggtaaccgatagcggnacnaactccaaggcanntgnggacttgantccattcctaagcngacctcttttttgtnccccctcaagcctcaagggnnnctcnaancccctncttaaatacnccttggntgantggngacccctnaagccccaancatncattctttcccaaaaacccttcctttccccntccntccccccaccccttancntacanccaaagtgnaccnaantcnntntntaaatttnccnagaanggaaattnncnnccnccnccccngggggggannccancanggggctnaattttaannncngttnctnnnaaataggaaaccnaannagnactncntgtccctnnganntaccangcttttnntanccccnncacnaatcgnggggggnngaanntntanatnnncaccccnctccccttntnnnaaatnccnngtcaaaancnccccnnttnccanaaaaccncanaaantnaaannccgcctnaanataaggggagncctnnngaaagaaaatanaananntattacaatgncctnanaannancntaaaannaaannngnatnatanncnttcccntnaaaaataaagcntcttntaannggnggaaaaaacnnngggnngaaaaaatatnnagantcttctntttantntnaaaacntttntataaatagaannnnttnnaaaaaatataanaaaata

SEQ ID NO: 148 - DNA, 1405 bp, Homo Sapiens
  misc_feature (770)..(770): n is a, c, g, or t
  misc_feature (805)..(805): n is a, c, g, or t
  misc_feature (823)..(823): n is a, c, g, or t
  misc_feature (848)..(848): n is a, c, g, or t
  misc_feature (851)..(851): n is a, c, g, or t
  misc_feature (858)..(858): n is a, c, g, or t
  misc_feature (870)..(870): n is a, c, g, or t
  misc_feature (901)..(902): n is a, c, g, or t
  misc_feature (911)..(911): n is a, c, g, or t
  misc_feature (915)..(915): n is a, c, g, or t
  misc_feature (921)..(921): n is a, c, g, or t
  misc_feature (934)..(934): n is a, c, g, or t
  misc_feature (938)..(938): n is a, c, g, or t
  misc_feature (953)..(953): n is a, c, g, or t
  misc_feature (972)..(972): n is a, c, g, or t
  misc_feature (974)..(975): n is a, c, g, or t
  misc_feature (992)..(992): n is a, c, g, or t
  misc_feature (998)..(998): n is a, c, g, or t
  misc_feature (1001)..(1001): n is a, c, g, or t
  misc_feature (1006)..(1006): n is a, c, g, or t
  misc_feature (1014)..(1014): n is a, c, g, or t
  misc_feature (1028)..(1028): n is a, c, g, or t
  misc_feature (1031)..(1032): n is a, c, g, or t
  misc_feature (1034)..(1049): n is a, c, g, or t
  misc_feature (1051)..(1052): n is a, c, g, or t
  misc_feature (1060)..(1060): n is a, c, g, or t
  misc_feature (1065)..(1065): n is a, c, g, or t
  misc_feature (1069)..(1069): n is a, c, g, or t
  misc_feature (1074)..(1074): n is a, c, g, or t
  misc_feature (1077)..(1077): n is a, c, g, or t
  misc_feature (1085)..(1085): n is a, c, g, or t
  misc_feature (1089)..(1089): n is a, c, g, or t
  misc_feature (1099)..(1099): n is a, c, g, or t
  misc_feature (1106)..(1107): n is a, c, g, or t
  misc_feature (1111)..(1112): n is a, c, g, or t
  misc_feature (1116)..(1116): n is a, c, g, or t
  misc_feature (1119)..(1119): n is a, c, g, or t
  misc_feature (1123)..(1125): n is a, c, g, or t
  misc_feature (1128)..(1128): n is a, c, g, or t
  misc_feature (1131)..(1131): n is a, c, g, or t
  misc_feature (1134)..(1134): n is a, c, g, or t
  misc_feature (1144)..(1144): n is a, c, g, or t
  misc_feature (1151)..(1151): n is a, c, g, or t
  misc_feature (1158)..(1158): n is a, c, g, or t
  misc_feature (1162)..(1168): n is a, c, g, or t
  misc_feature (1172)..(1172): n is a, c, g, or t
  misc_feature (1177)..(1177): n is a, c, g, or t
  misc_feature (1180)..(1181): n is a, c, g, or t
  misc_feature (1194)..(1195): n is a, c, g, or t
  misc_feature (1197)..(1197): n is a, c, g, or t
  misc_feature (1201)..(1201): n is a, c, g, or t
  misc_feature (1203)..(1203): n is a, c, g, or t
  misc_feature (1205)..(1210): n is a, c, g, or t
  misc_feature (1216)..(1217): n is a, c, g, or t
  misc_feature (1221)..(1221): n is a, c, g, or t
  misc_feature (1226)..(1228): n is a, c, g, or t
  misc_feature (1230)..(1232): n is a, c, g, or t
  misc_feature (1234)..(1235): n is a, c, g, or t
  misc_feature (1238)..(1241): n is a, c, g, or t
  misc_feature (1244)..(1248): n is a, c, g, or t
  misc_feature (1250)..(1250): n is a, c, g, or t
  misc_feature (1256)..(1260): n is a, c, g, or t
  misc_feature (1262)..(1265): n is a, c, g, or t
  misc_feature (1267)..(1273): n is a, c, g, or t
  misc_feature (1278)..(1279): n is a, c, g, or t
  misc_feature (1281)..(1286): n is a, c, g, or t
  misc_feature (1288)..(1293): n is a, c, g, or t
  misc_feature (1304)..(1304): n is a, c, g, or t
  misc_feature (1307)..(1308): n is a, c, g, or t
  misc_feature (1311)..(1316): n is a, c, g, or t
  misc_feature (1318)..(1324): n is a, c, g, or t
  misc_feature (1326)..(1327): n is a, c, g, or t
  misc_feature (1329)..(1329): n is a, c, g, or t
  misc_feature (1332)..(1332): n is a, c, g, or t
  misc_feature (1336)..(1337): n is a, c, g, or t
  misc_feature (1339)..(1344): n is a, c, g, or t
  misc_feature (1346)..(1346): n is a, c, g, or t
  misc_feature (1348)..(1353): n is a, c, g, or t
  misc_feature (1358)..(1358): n is a, c, g, or t
  misc_feature (1360)..(1363): n is a, c, g, or t
  misc_feature (1366)..(1366): n is a, c, g, or t
  misc_feature (1372)..(1376): n is a, c, g, or t
  misc_feature (1381)..(1386): n is a, c, g, or t
  misc_feature (1392)..(1392): n is a, c, g, or t
  misc_feature (1398)..(1398): n is a, c, g, or t
  misc_feature (1400)..(1403): n is a, c, g, or t
tgagaaattactatgagaggatcgcatcaccatcaccatcacggatcctatttaggtgacactatagaatcgtcgacccacgcgtccgcaggggcgtgcagcccgcttgccaatcagagcgcggctgagcggccccgcagccaacccccgaggagcggccggctggcgtccgccgcgcccaggagttggggatgtcctacaaacccatcgcccctgctcccagcagcacccctggctccagcacccctgggccgggcaccccggtccctacaggaagcgtcccgtcgccgtcgggctcagtgccaggagccggcgctcctttcagaccgctgtttaacgactttggaccgccttccatgggctacgtgcaggcgatgaagccacccggcgcccagggctcccagagcacctacacggacctgctgtcagtcatagaggagatgggcaaagagatccggcctacctatgctggcagcaagagcgccatggagcgcctgaagagaggtatcatccatgcccgggccctagtcagagagtgcctggcagagacagagcggaacgcccgcacgtaacaggaagcgcctcggcctcagcgtctggacctatccggccactgcagagcacccgcttctccctggccttcatcccgagttgcactaaccatcctgggcttcctgtcctgtgtcccttggtgggtcccctccaggaaccaaggagtggccctccaggtggcagcactaaggacacccccccacaacaagagttagcancgaggtccccatgagtcccacccatgacctgcccnacagtgttgcccaccggnaacttttgtggcccctaccgctcanccnttcccancacttctcccanttttgtcccgaagcctccttcttcccccaannaaggggcanaggncttggnaacctccctggcnttgngtcctgaaacaaaangaactcttttatctggggngnnttttgcaaaaaatgccntttttntanttaanaaaaaaanattttgaaaaaaanaannannnnnnnnnnnnnnnngnngggccccnccctnaaanggaantcnaattaaancttnattaattgantttgganncctnntttnaantccnnnaanganccncaaaactccnttttganttttttnaaannnnnnntttnccccnggnntttttttttttgnngnaaancnannnnnntttggnnaaanttttnnnannnannaannnnaannnnnanaaaaannnnngnnnnannnnnnnttaanntnnnnnngnnnnnnaaaaaattttnagnnttnnnnnntnnnnnnnannanaanaaanntnnnnnnantnnnnnnttttnannnnaanaaaaannnnnttttnnnnnntttttntttttncnnnnaa

SEQ ID NO: 149 - DNA, 1411 bp, Homo Sapiens
  misc_feature (853)..(853): n is a, c, g, or t
  misc_feature (889)..(889): n is a, c, g, or t
  misc_feature (955)..(955): n is a, c, g, or t
  misc_feature (974)..(975): n is a, c, g, or t
  misc_feature (984)..(984): n is a, c, g, or t
  misc_feature (995)..(995): n is a, c, g, or t
  misc_feature (1002)..(1002): n is a, c, g, or t
  misc_feature (1008)..(1008): n is a, c, g, or t
  misc_feature (1017)..(1017): n is a, c, g, or t
  misc_feature (1020)..(1021): n is a, c, g, or t
  misc_feature (1038)..(1039): n is a, c, g, or t
  misc_feature (1043)..(1043): n is a, c, g, or t
  misc_feature (1050)..(1050): n is a, c, g, or t
  misc_feature (1061)..(1061): n is a, c, g, or t
  misc_feature (1068)..(1068): n is a, c, g, or t
  misc_feature (1071)..(1071): n is a, c, g, or t
  misc_feature (1075)..(1075): n is a, c, g, or t
  misc_feature (1079)..(1079): n is a, c, g, or t
  misc_feature (1082)..(1082): n is a, c, g, or t
  misc_feature (1092)..(1092): n is a, c, g, or t
  misc_feature (1095)..(1095): n is a, c, g, or t
  misc_feature (1099)..(1099): n is a, c, g, or t
  misc_feature (1115)..(1115): n is a, c, g, or t
  misc_feature (1117)..(1117): n is a, c, g, or t
  misc_feature (1124)..(1124): n is a, c, g, or t
  misc_feature (1153)..(1154): n is a, c, g, or t
  misc_feature (1157)..(1158): n is a, c, g, or t
  misc_feature (1161)..(1161): n is a, c, g, or t
  misc_feature (1164)..(1164): n is a, c, g, or t
  misc_feature (1186)..(1186): n is a, c, g, or t
  misc_feature (1191)..(1191): n is a, c, g, or t
  misc_feature (1195)..(1195): n is a, c, g, or t
  misc_feature (1209)..(1209): n is a, c, g, or t
  misc_feature (1211)..(1211): n is a, c, g, or t
  misc_feature (1215)..(1215): n is a, c, g, or t
  misc_feature (1219)..(1219): n is a, c, g, or t
  misc_feature (1223)..(1223): n is a, c, g, or t
  misc_feature (1230)..(1230): n is a, c, g, or t
  misc_feature (1236)..(1236): n is a, c, g, or t
  misc_feature (1246)..(1246): n is a, c, g, or t
  misc_feature (1249)..(1249): n is a, c, g, or t
  misc_feature (1251)..(1252): n is a, c, g, or t
  misc_feature (1254)..(1333): n is a, c, g, or t
  misc_feature (1335)..(1337): n is a, c, g, or t
  misc_feature (1340)..(1341): n is a, c, g, or t
  misc_feature (1343)..(1349): n is a, c, g, or t
  misc_feature (1351)..(1377): n is a, c, g, or t
  misc_feature (1382)..(1382): n is a, c, g, or t
  misc_feature (1384)..(1384): n is a, c, g, or t
  misc_feature (1387)..(1397): n is a, c, g, or t
  misc_feature (1399)..(1399): n is a, c, g, or t
  misc_feature (1402)..(1403): n is a, c, g, or t
  misc_feature (1405)..(1405): n is a, c, g, or t
tagagagaattactatgagaggatcgcatcaccatcaccatcacggatcctatttaggtgacactatagaatcgtcgacccacgcgtccgagcgcaggttgtccccgtttcccctcccccttcccttctccggttgccttcccgggccccttacactccacagtcccggtcccgccatgtcccagaaacaagaagaagagaaccctgcggaggagaccggcgaggagaagcaggacacgcaggagaaagaaggtattctgcctgagagagctgaagaggcaaagctaaaggccaaatacccaagcctaggacaaaagcctggaggctccgacttcctcatgaagagactccagaaagggcaaaagtactttgactcaggagactacaacatggccaaagccaagatgaagaataagcagctgccaagtgcaggaccagacaagaacctggtgactggtgatcacatccccaccccacaggatctgccccagagaaagtcctcgctcgtcaccagcaagcttgcgggtggccaagttgaatgatgctgcccggggctctgccagatcctgagacgcttcccctccctgccccacccgggtcctgtgctggctcctgccccttcctgcttttgcagccaggggtcaggaggtggctcgggtgtgggctggagaggcagaagccctttcctgttggtgtcccagcacatggagccccttgggctgagcaccaagaccttgaaccttttttgttttaccttttttccaaataacagttgggagaaatatcaatgaaattctgggggtgggggtggggttgaaagggtggggtgggagatatggaggagtatgaattnagggcttggagttggtaaaaaacattcctgactatnccttcttaaccacgtggctgatgtgggggtaggtatgaggggaaaggaagtggagtaacctaatgnaaaaaggggttctagttgnncttctgtanataaatgcctngtttcantggggnttggaaacntgnngtcaaaaaaaaaaaacnncctncgcccanaaagatgcaanagttccnttntttntgcnaanctagttgganaanccanattaatctttttaaangnacttgtncttgaaaaaattttttggggaaaaaaggnntgnntgnggnaaaaaaaccctgaggggggganccccnaaancccaagaatttttntntttnaaanaaanaaaaaanccctgnaaaaaaaaanaanannannnnnnnnnnnnnnnnnnnnnnnnnnnnnnnnnnnnnnnnnnnnnnnnnnnnnnnnnnnnnnnnnnnnnnnnnnnnnnnntnnnttnntnnnnnnnannnnnnnnnnnnnnnnnnnnnnnnnnnttttntnttnnnnnnnnnnntnatnnanaaaaaa

SEQ ID NO: 150 - DNA, 1420 bp, Homo Sapiens
  misc_feature (758)..(758): n is a, c, g, or t
  misc_feature (810)..(810): n is a, c, g, or t
  misc_feature (859)..(859): n is a, c, g, or t
  misc_feature (867)..(867): n is a, c, g, or t
  misc_feature (900)..(900): n is a, c, g, or t
  misc_feature (906)..(906): n is a, c, g, or t
  misc_feature (908)..(908): n is a, c, g, or t
  misc_feature (930)..(930): n is a, c, g, or t
  misc_feature (938)..(938): n is a, c, g, or t
  misc_feature (948)..(948): n is a, c, g, or t
  misc_feature (954)..(954): n is a, c, g, or t
  misc_feature (959)..(959): n is a, c, g, or t
  misc_feature (975)..(975): n is a, c, g, or t
  misc_feature (986)..(986): n is a, c, g, or t
  misc_feature (993)..(994): n is a, c, g, or t
  misc_feature (1000)..(1000): n is a, c, g, or t
  misc_feature (1002)..(1003): n is a, c, g, or t
  misc_feature (1008)..(1008): n is a, c, g, or t
  misc_feature (1015)..(1015): n is a, c, g, or t
  misc_feature (1018)..(1018): n is a, c, g, or t
  misc_feature (1021)..(1021): n is a, c, g, or t
  misc_feature (1036)..(1036): n is a, c, g, or t
  misc_feature (1047)..(1047): n is a, c, g, or t
  misc_feature (1052)..(1052): n is a, c, g, or t
  misc_feature (1056)..(1056): n is a, c, g, or t
  misc_feature (1067)..(1067): n is a, c, g, or t
  misc_feature (1070)..(1071): n is a, c, g, or t
  misc_feature (1073)..(1073): n is a, c, g, or t
  misc_feature (1083)..(1083): n is a, c, g, or t
  misc_feature (1088)..(1088): n is a, c, g, or t
  misc_feature (1104)..(1104): n is a, c, g, or t
  misc_feature (1106)..(1107): n is a, c, g, or t
  misc_feature (1114)..(1114): n is a, c, g, or t
  misc_feature (1116)..(1116): n is a, c, g, or t
  misc_feature (1124)..(1124): n is a, c, g, or t
  misc_feature (1129)..(1129): n is a, c, g, or t
  misc_feature (1131)..(1131): n is a, c, g, or t
  misc_feature (1134)..(1134): n is a, c, g, or t
  misc_feature (1150)..(1150): n is a, c, g, or t
  misc_feature (1153)..(1153): n is a, c, g, or t
  misc_feature (1170)..(1171): n is a, c, g, or t
  misc_feature (1175)..(1176): n is a, c, g, or t
  misc_feature (1179)..(1179): n is a, c, g, or t
  misc_feature (1183)..(1184): n is a, c, g, or t
  misc_feature (1189)..(1189): n is a, c, g, or t
  misc_feature (1193)..(1193): n is a, c, g, or t
  misc_feature (1197)..(1198): n is a, c, g, or t
  misc_feature (1200)..(1200): n is a, c, g, or t
  misc_feature (1204)..(1204): n is a, c, g, or t
  misc_feature (1208)..(1208): n is a, c, g, or t
  misc_feature (1212)..(1212): n is a, c, g, or t
  misc_feature (1215)..(1217): n is a, c, g, or t
  misc_feature (1225)..(1225): n is a, c, g, or t
  misc_feature (1229)..(1229): n is a, c, g, or t
  misc_feature (1252)..(1252): n is a, c, g, or t
  misc_feature (1254)..(1254): n is a, c, g, or t
  misc_feature (1257)..(1258): n is a, c, g, or t
  misc_feature (1261)..(1261): n is a, c, g, or t
  misc_feature (1265)..(1266): n is a, c, g, or t
  misc_feature (1269)..(1269): n is a, c, g, or t
  misc_feature (1271)..(1271): n is a, c, g, or t
  misc_feature (1278)..(1278): n is a, c, g, or t
  misc_feature (1289)..(1289): n is a, c, g, or t
  misc_feature (1300)..(1300): n is a, c, g, or t
  misc_feature (1302)..(1302): n is a, c, g, or t
  misc_feature (1313)..(1313): n is a, c, g, or t
  misc_feature (1315)..(1317): n is a, c, g, or t
  misc_feature (1322)..(1322): n is a, c, g, or t
  misc_feature (1332)..(1332): n is a, c, g, or t
  misc_feature (1334)..(1335): n is a, c, g, or t
  misc_feature (1337)..(1337): n is a, c, g, or t
  misc_feature (1340)..(1342): n is a, c, g, or t
  misc_feature (1348)..(1352): n is a, c, g, or t
  misc_feature (1360)..(1360): n is a, c, g, or t
  misc_feature (1365)..(1366): n is a, c, g, or t
  misc_feature (1368)..(1370): n is a, c, g, or t
  misc_feature (1381)..(1381): n is a, c, g, or t
  misc_feature (1383)..(1383): n is a, c, g, or t
  misc_feature (1385)..(1385): n is a, c, g, or t
  misc_feature (1388)..(1388): n is a, c, g, or t
  misc_feature (1390)..(1390): n is a, c, g, or t
  misc_feature (1394)..(1396): n is a, c, g, or t
  misc_feature (1398)..(1400): n is a, c, g, or t
  misc_feature (1403)..(1406): n is a, c, g, or t
  misc_feature (1408)..(1408): n is a, c, g, or t
  misc_feature (1413)..(1413): n is a, c, g, or t
  misc_feature (1415)..(1415): n is a, c, g, or t
  misc_feature (1418)..(1418): n is a, c, g, or t
tagagagattactatgagaggatcgcatcaccatcaccatcacggatcctatttaggtgacactatagaatcgtcgacccacgcgtccgagcagcgcaggttgtccccgtttcccctcccccttcccttctccggttgccttcccgggccccttacactccacagtcccggtcccgccatgtcccagaaacaagaagaagagaaccctgcggaggagaccggcgaggagaagcaggacacgcaggagaaagaaggtattctgcctgagagagctgaagaggcaaagctaaaggccaaatacccaagcctaggacaaaagcctggaggctccgacttcctcatgaagagactccagaaagggcaaaagtactttgactcaggagactacaacatggccaaagccaagatgaagaataagcagctgccaagtgcaggaccagacaagaacctggtgactggtgatcacatccccaccccacaggatctgccccagagaaagtcctcgctcgtcaccagcaagcttgcggggtaacctgagcccccctctcctccccttcctcaaccactggacgtttatatattataggcagggatgaaatgggcacctagtcagatcttctcagcttgctagccagaaatgactgtgattctgctgggggctgctgagaaggtaatgtaggttgaaaaggggctctaagtttatttatttcgttagattgacacttccacacactccctgtagtccaggtagggcctanaaataggaaaggctaggattggataatgctgcaaatgctttttttgtgtganaaactggagagatgtgatttctcctttttgggagagaatgtcccaaaanttgattangctgagccttgggaatagtttggcaggtttaanatcccnanggctaacctaacgtaattgggnaaaggtanattgaatganacatgnttttntgggcttctaagtgtnctgtcccttangctgctnntggttncnngtttnccattanggnagntttaaaaaatccttnaaaaaaaaaanttganttgnttgcctaaaantanngngcccccttanccccnttaattaaaatccctnanngttggcntnggcccccnaaaananaangttggggaactttttnccngaaaagggggccctttnncttnnttncccnngtttntttnaaanntntggnaaangganaannntgttttanaatnaaaatttgggtttccttctcccntnccnnaanggtnnaancnggataantttaccccggnattttttcccncntaaaaaattangnnnaaaantttttttttnanntnttnnnaaaaannnnnttttttanaaaannannnggggggggccncntnttngnaaannngnnnttnnnnanaaatntnttntt

SEQ ID NO: 151 - DNA, 843 bp, Homo Sapiens
gatttttaagaagggaggaattaactatgagaggatcgcatcaccatcaccatcacggatcctatttaggtgacactatagaatcgtcgacccacgcgtccgagcagcgcaggttgtccccgtttcccctcccccttcccttctccggttgccttcccgggccccttacactccacagtcccggtcccgccatgtcccagaaacaagaagaagagaaccctgcggaggagaccggcgaggagaagcaggacacgcaggagaaagaaggtattctgcctgagagagctgaagaggcaaagctaaaggccaaatacccaagcctaggacaaaagcctggaggctccgacttcctcatgaagagactccagaaagggcaaaagtactttgactcaggagactacaacatggccaaagccaagatgaagaataagcagctgccaagtgcaggaccagacaagaacctggtgactggtgatcacatccccaccccacaggatctgccccagagaaagtcctcgctcgtcaccagcaagcttgcgggtggccaagttgaatgatgctgcccggggctctgccagatcctgagacgcttcccctccctgccccacccgggtcctgtgctggctcctgccccttcctgcttttgcagccaggggtcaggaggtggctcgggtgtgggctggagaggcagaagccctttcctgttggtgtcccagcacatggagccccttgggctgagcaccaagaccttgaaccttttttgttttaccttttttccaaataacagttgggagaaatatcaatgaaattctgggggtgggggtggggttgaaagggtggggg

SEQ ID NO: 152 - DNA, 1403 bp, Homo Sapiens
  misc_feature (7)..(13): n is a, c, g, or t
  misc_feature (838)..(838): n is a, c, g, or t
  misc_feature (887)..(887): n is a, c, g, or t
  misc_feature (910)..(910): n is a, c, g, or t
  misc_feature (917)..(917): n is a, c, g, or t
  misc_feature (954)..(954): n is a, c, g, or t
  misc_feature (973)..(973): n is a, c, g, or t
  misc_feature (983)..(983): n is a, c, g, or t
  misc_feature (986)..(986): n is a, c, g, or t
  misc_feature (989)..(989): n is a, c, g, or t
  misc_feature (1002)..(1002): n is a, c, g, or t
  misc_feature (1022)..(1022): n is a, c, g, or t
  misc_feature (1033)..(1033): n is a, c, g, or t
  misc_feature (1050)..(1050): n is a, c, g, or t
  misc_feature (1071)..(1072): n is a, c, g, or t
  misc_feature (1087)..(1087): n is a, c, g, or t
  misc_feature (1119)..(1119): n is a, c, g, or t
  misc_feature (1121)..(1121): n is a, c, g, or t
  misc_feature (1123)..(1123): n is a, c, g, or t
  misc_feature (1125)..(1126): n is a, c, g, or t
  misc_feature (1129)..(1129): n is a, c, g, or t
  misc_feature (1138)..(1138): n is a, c, g, or t
  misc_feature (1168)..(1168): n is a, c, g, or t
  misc_feature (1177)..(1177): n is a, c, g, or t
  misc_feature (1182)..(1182): n is a, c, g, or t
  misc_feature (1222)..(1222): n is a, c, g, or t
  misc_feature (1240)..(1240): n is a, c, g, or t
  misc_feature (1244)..(1244): n is a, c, g, or t
  misc_feature (1266)..(1266): n is a, c, g, or t
  misc_feature (1268)..(1269): n is a, c, g, or t
  misc_feature (1277)..(1277): n is a, c, g, or t
  misc_feature (1300)..(1303): n is a, c, g, or t
  misc_feature (1306)..(1309): n is a, c, g, or t
  misc_feature (1312)..(1315): n is a, c, g, or t
  misc_feature (1318)..(1319): n is a, c, g, or t
  misc_feature (1321)..(1323): n is a, c, g, or t
  misc_feature (1325)..(1325): n is a, c, g, or t
  misc_feature (1327)..(1327): n is a, c, g, or t
  misc_feature (1330)..(1334): n is a, c, g, or t
  misc_feature (1336)..(1344): n is a, c, g, or t
  misc_feature (1346)..(1348): n is a, c, g, or t
  misc_feature (1352)..(1357): n is a, c, g, or t
  misc_feature (1360)..(1360): n is a, c, g, or t
  misc_feature (1362)..(1369): n is a, c, g, or t
  misc_feature (1374)..(1374): n is a, c, g, or t
  misc_feature (1382)..(1382): n is a, c, g, or t
  misc_feature (1385)..(1385): n is a, c, g, or t
  misc_feature (1390)..(1390): n is a, c, g, or t
  misc_feature (1392)..(1393): n is a, c, g, or t
  misc_feature (1398)..(1398): n is a, c, g, or t
  misc_feature (1400)..(1400): n is a, c, g, or t
  misc_feature (1403)..(1403): n is a, c, g, or t
cgtctcnnnnnnnaatagagaaattactatgagaggatcgcatcaccatcaccatcacggatcctatttaggtgacactatagaatcgtcgacccacgcgtccgcccagagattgccgagcagcgaggagagcgtgacagccagacccaggccatcctcaccaagctcaagtgtgccgcaggcttggcagagctggccgccaggaagtacaagcaggctgccaagtgcctcctgctggcttcctttgatcactgtgacttccctgagctgctgtcccccagcaacgtggccatctacggtggcctgtgcgccttggctacctttgaccggcaggagctgcagcgcaatgtcatctccagcagctccttcaagttgttcttggagctggagccacaggtccgagacatcatcttcaaattctacgagtccaagtacgcctcatgtctcaagatgctggacgagatgaaggacaacctgctcctggacatgtatctggccccccatgtcaggaccctgtacacccagattcgcaaccgtgccctcatccagtatttcagcccctacgtgtcagccgacatgcataggatggcggcagccttcaataccacggtggccgccctggaggacgagctgacgcagctaatcctggaggggctgatcagtgcccgtgtggactcacacagcaagatcctatacgcccgggacgtggatcagcgcagcaccacctttgagaagtctctgttgatgggcaaggagttccagcgccgcgccaaggccatgatgctgcgggcagctgtgctccgcaaccagatccatgtcaagtccccgcccagagaanggagccagggggagctgactccaagccaacaagccagtcccggaatgancaccaaacatgtgaggggtgaanccttggncctcaaggaaatctgcacccccttcccccaccttcanggaaccttcgggacctccnaggcgggctncantgnctgccctggcggnccaaactaaaggggcctggnccactggggtngccacccaagcctgggntgccctccctgggggcctaannaggcaagccggcttnctaaattggggcccctttctggaaaaggaaangncntnncanggcttcaanccttggggggttttttttccccaggggaanaaaattggnggggnaccccaagccccaaggggaacaattttccaaaaacccctncttttccccccctaattnaggngcaaaaaaaggggggggggttncnntaaaaaanaaaacccccgtttaaaaaaaaannnnaannnnaannnnaannannnananaannnnntnnnnnnnnnannnaaannnnnnaanannnnnnnnggggngccccccnctntgggngnntatantnttn

SEQ ID NO: 153 - DNA, 1367 bp, Homo Sapiens
  misc_feature (366)..(366): n is a, c, g, or t
  misc_feature (889)..(889): n is a, c, g, or t
  misc_feature (923)..(923): n is a, c, g, or t
  misc_feature (951)..(951): n is a, c, g, or t
  misc_feature (958)..(958): n is a, c, g, or t
  misc_feature (964)..(964): n is a, c, g, or t
  misc_feature (977)..(977): n is a, c, g, or t
  misc_feature (985)..(985): n is a, c, g, or t
  misc_feature (992)..(992): n is a, c, g, or t
  misc_feature (1005)..(1005): n is a, c, g, or t
  misc_feature (1009)..(1009): n is a, c, g, or t
  misc_feature (1015)..(1015): n is a, c, g, or t
  misc_feature (1022)..(1022): n is a, c, g, or t
  misc_feature (1030)..(1030): n is a, c, g, or t
  misc_feature (1053)..(1053): n is a, c, g, or t
  misc_feature (1067)..(1067): n is a, c, g, or t
  misc_feature (1069)..(1069): n is a, c, g, or t
  misc_feature (1076)..(1079): n is a, c, g, or t
  misc_feature (1081)..(1081): n is a, c, g, or t
  misc_feature (1083)..(1083): n is a, c, g, or t
  misc_feature (1094)..(1094): n is a, c, g, or t
  misc_feature (1102)..(1103): n is a, c, g, or t
  misc_feature (1107)..(1107): n is a, c, g, or t
  misc_feature (1109)..(1109): n is a, c, g, or t
  misc_feature (1118)..(1118): n is a, c, g, or t
  misc_feature (1122)..(1124): n is a, c, g, or t
  misc_feature (1132)..(1132): n is a, c, g, or t
  misc_feature (1134)..(1134): n is a, c, g, or t
  misc_feature (1139)..(1139): n is a, c, g, or t
  misc_feature (1142)..(1142): n is a, c, g, or t
  misc_feature (1144)..(1144): n is a, c, g, or t
  misc_feature (1147)..(1147): n is a, c, g, or t
  misc_feature (1154)..(1154): n is a, c, g, or t
  misc_feature (1161)..(1162): n is a, c, g, or t
  misc_feature (1164)..(1164): n is a, c, g, or t
  misc_feature (1170)..(1170): n is a, c, g, or t
  misc_feature (1172)..(1173): n is a, c, g, or t
  misc_feature (1189)..(1189): n is a, c, g, or t
  misc_feature (1193)..(1193): n is a, c, g, or t
  misc_feature (1201)..(1202): n is a, c, g, or t
  misc_feature (1211)..(1211): n is a, c, g, or t
  misc_feature (1213)..(1213): n is a, c, g, or t
  misc_feature (1218)..(1219): n is a, c, g, or t
  misc_feature (1226)..(1226): n is a, c, g, or t
  misc_feature (1229)..(1229): n is a, c, g, or t
  misc_feature (1232)..(1232): n is a, c, g, or t
  misc_feature (1236)..(1236): n is a, c, g, or t
  misc_feature (1239)..(1239): n is a, c, g, or t
  misc_feature (1243)..(1243): n is a, c, g, or t
  misc_feature (1255)..(1255): n is a, c, g, or t
  misc_feature (1263)..(1264): n is a, c, g, or t
  misc_feature (1269)..(1269): n is a, c, g, or t
  misc_feature (1273)..(1273): n is a, c, g, or t
  misc_feature (1276)..(1277): n is a, c, g, or t
  misc_feature (1283)..(1283): n is a, c, g, or t
  misc_feature (1287)..(1287): n is a, c, g, or t
  misc_feature (1289)..(1289): n is a, c, g, or t
  misc_feature (1299)..(1299): n is a, c, g, or t
  misc_feature (1301)..(1301): n is a, c, g, or t
  misc_feature (1303)..(1304): n is a, c, g, or t
  misc_feature (1309)..(1315): n is a, c, g, or t
  misc_feature (1319)..(1320): n is a, c, g, or t
  misc_feature (1324)..(1330): n is a, c, g, or t
  misc_feature (1338)..(1338): n is a, c, g, or t
  misc_feature (1341)..(1348): n is a, c, g, or t
  misc_feature (1350)..(1351): n is a, c, g, or t
  misc_feature (1358)..(1358): n is a, c, g, or t
  misc_feature (1363)..(1364): n is a, c, g, or t
gagaaattactatgagaggatcgcatcaccatcaccatcacggatcctatttaggtgacactatagaatcgtcgacccacgcgtccggaaagcgtagacccggggcccagggtctgcccgcccctgcagcctggcctccccgcacaggctgtggcttgcactccagccgctctagtctctcaggaatttgcttgttacttgtactgtgtaaataaagcttcctggttcaatacccaaaaaaaaaaaaaaaaaaaaaaaaagggcggccgctccctatagtgagtcgtattaagcttaattagctgagcttggactcctgttgatagatccagtaatgacctcagaactccatctggatttgttcanaacgctcggttgccgccgggcgttttttattggtgagaatccaagctagcttggcgagattttcaggagctaaggaagctaaaatggagaaaaaaatcactggatataccaccgttgatatatcccaatggcatcgtaaagaacattttgaggcatttcagtcagttgctcaatgtacctataaccagaccgttcagctggatattacggcctttttaaagaccgtaaagaaaaataagcacaagttttatccggcctttattcacattcttgcccgcctgatgaatgctcatccggaatttcgtatggcaatgaaagacggtgagctggtgatatgggatagtgttcacccttgttacaccgttttccatgagcaaactgaaacgttttcatcgctctggagtgaataccacgacgatttccggcagtttctacacatatattcgcaagatgtggcgtgttacggtgaaaacctggcctatttccctaaaagggtttattgaaaatatgtttttcgtctcanccaatccctgggtgagtttcaccagttttgattnaacgtggccaatatggacaacttcttcncccccgnttttcnccatggggcaaanattatacncaaggcnacaaggggctgangccnctggcnaatcagnttcatcangccgttggggaaggccttccagnccgccaaaatgctnangaattannnnantnctgccaataantggcaggnngggncnaattttttnaagnnntttttggngnccctnaancnccnggggaangaccccnnancttgangnncaaaaaaaaaaaaggnccanccaaaaanngggcccttncntttanngggggtnggnggnaaanccncccnaaaaaaaaaaancccccccnnaaaangccnccnnggtttngggnanaagggaaaancncnnaaaannnnnnncccnnaaannnnnnntttttttnaannnnnnnngnnaaaaaanccccnnggg

SEQ ID NO: 154 - DNA, 1437 bp, Homo Sapiens
  misc_feature (879)..(879): n is a, c, g, or t
  misc_feature (922)..(922): n is a, c, g, or t
  misc_feature (948)..(948): n is a, c, g, or t
  misc_feature (970)..(970): n is a, c, g, or t
  misc_feature (972)..(972): n is a, c, g, or t
  misc_feature (982)..(982): n is a, c, g, or t
  misc_feature (985)..(985): n is a, c, g, or t
  misc_feature (1013)..(1013): n is a, c, g, or t
  misc_feature (1023)..(1023): n is a, c, g, or t
  misc_feature (1030)..(1030): n is a, c, g, or t
  misc_feature (1045)..(1045): n is a, c, g, or t
  misc_feature (1052)..(1052): n is a, c, g, or t
  misc_feature (1055)..(1056): n is a, c, g, or t
  misc_feature (1058)..(1058): n is a, c, g, or t
  misc_feature (1069)..(1069): n is a, c, g, or t
  misc_feature (1104)..(1104): n is a, c, g, or t
  misc_feature (1115)..(1115): n is a, c, g, or t
  misc_feature (1118)..(1118): n is a, c, g, or t
  misc_feature (1122)..(1122): n is a, c, g, or t
  misc_feature (1127)..(1127): n is a, c, g, or t
  misc_feature (1129)..(1129): n is a, c, g, or t
  misc_feature (1135)..(1135): n is a, c, g, or t
  misc_feature (1143)..(1143): n is a, c, g, or t
  misc_feature (1145)..(1145): n is a, c, g, or t
  misc_feature (1152)..(1152): n is a, c, g, or t
  misc_feature (1157)..(1157): n is a, c, g, or t
  misc_feature (1170)..(1171): n is a, c, g, or t
  misc_feature (1175)..(1176): n is a, c, g, or t
  misc_feature (1178)..(1178): n is a, c, g, or t
  misc_feature (1184)..(1184): n is a, c, g, or t
  misc_feature (1192)..(1192): n is a, c, g, or t
  misc_feature (1203)..(1203): n is a, c, g, or t
  misc_feature (1206)..(1206): n is a, c, g, or t
  misc_feature (1213)..(1213): n is a, c, g, or t
  misc_feature (1226)..(1226): n is a, c, g, or t
  misc_feature (1253)..(1253): n is a, c, g, or t
  misc_feature (1255)..(1255): n is a, c, g, or t
  misc_feature (1257)..(1258): n is a, c, g, or t
  misc_feature (1261)..(1261): n is a, c, g, or t
  misc_feature (1263)..(1263): n is a, c, g, or t
  misc_feature (1265)..(1266): n is a, c, g, or t
  misc_feature (1283)..(1283): n is a, c, g, or t
  misc_feature (1290)..(1290): n is a, c, g, or t
  misc_feature (1299)..(1300): n is a, c, g, or t
  misc_feature (1303)..(1303): n is a, c, g, or t
  misc_feature (1319)..(1319): n is a, c, g, or t
  misc_feature (1322)..(1322): n is a, c, g, or t
  misc_feature (1325)..(1325): n is a, c, g, or t
  misc_feature (1327)..(1329): n is a, c, g, or t
  misc_feature (1336)..(1336): n is a, c, g, or t
  misc_feature (1342)..(1342): n is a, c, g, or t
  misc_feature (1350)..(1350): n is a, c, g, or t
  misc_feature (1363)..(1363): n is a, c, g, or t
  misc_feature (1379)..(1379): n is a, c, g, or t
  misc_feature (1381)..(1381): n is a, c, g, or t
  misc_feature (1384)..(1384): n is a, c, g, or t
  misc_feature (1391)..(1393): n is a, c, g, or t
  misc_feature (1395)..(1396): n is a, c, g, or t
  misc_feature (1401)..(1402): n is a, c, g, or t
  misc_feature (1404)..(1405): n is a, c, g, or t
  misc_feature (1413)..(1413): n is a, c, g, or t
  misc_feature (1423)..(1424): n is a, c, g, or t
  misc_feature (1429)..(1429): n is a, c, g, or t
  misc_feature (1435)..(1435): n is a, c, g, or t
agagagattactatgagaggatcgcatcaccatcaccatcacggatcctatttaggtgacactatagaatcgtcgacccacgcgtccgcggacctactgggctccatcctgagctccatggagaagccacccagcctcggtgaccaggagactcggcgcaaggcccgagaacaggccgcccgcctgaagaaactacaagagcaagagaaacaacagaaagtggagtttcgtaaaaggatggagaaggaggtgtcagatttcattcaagacagtgggcagatcaagaaaaagtttcagccaatgaacaagatcgagaggagcatactacatgatgtggtggaagtggctggcctgacatccttctcctttggggaagatgatgactgtcgctatgtcatgatcttcaaaaaggagtttgcaccctcagatgaagagctagactcttaccgtcgtggagaggaatgggacccccagaaggctgaggagaagcggaagctgaaggagctggcccagaggcaagaggaggaggcagcccagcaggggcctgtggtggtgagccctgccagcgactacaaggacaagtacagccacctcatcggcaagggagcagccaaagacgcagcccacatgctacaggccaataagacctacggctgtgtgcccgtggccaataagagggacacacgctccattgaagaggctatgaatgagatcagagccaagaagcgtctgcggcagagtggggaagagttgccgccaacctcctaggcgccccgcccagctccctttgacccctggggcagggcagggggcagggagagacaaggctgctgctattagagcccatcctggagccccacctctgaaccacctcctacnagctgtccctcaggctgggggaaaacaggtgtttgatttgtcnccgttggagcttggatatgtgcgtgncatgtgtgtgtgtgtgtgaaantntgaatgcccnggngggtatttatctgtattattccccgttntgggaatttncttcccntgggggctgggggtncttttanttnnanaattactgttnaccccaaaaaaaaaaaaaaaaaaaaaaaaaaaaangggggcccccnccntaanggggncnaataanctttttantngacttgnccccngttgaaaatcccnnatgnncnccaacnccctctgntttttcaaacnccnggttccnccggggttttttngggaaaccccctccttgggaatttttngncnnggncntnnggggaaaaacccggttncccgttntttcccggnnccnaaaaatttgggttttngtnctngnnnaaccacnctcggntttctttnaaaaaaaaaaaanttccttttttttcccngntcnccttttnnnannggggnngnntttttttntaaaattttnnaaaancctttngg

SEQ ID NO: 155 - DNA, 1200 bp, Homo Sapiens
  misc_feature (411)..(411): n is a, c, g, or t
  misc_feature (468)..(468): n is a, c, g, or t
  misc_feature (585)..(585): n is a, c, g, or t
  misc_feature (634)..(634): n is a, c, g, or t
  misc_feature (647)..(647): n is a, c, g, or t
  misc_feature (655)..(655): n is a, c, g, or t
  misc_feature (661)..(661): n is a, c, g, or t
  misc_feature (664)..(664): n is a, c, g, or t
  misc_feature (678)..(678): n is a, c, g, or t
  misc_feature (708)..(708): n is a, c, g, or t
  misc_feature (713)..(713): n is a, c, g, or t
  misc_feature (721)..(721): n is a, c, g, or t
  misc_feature (724)..(724): n is a, c, g, or t
  misc_feature (741)..(741): n is a, c, g, or t
  misc_feature (748)..(749): n is a, c, g, or t
  misc_feature (771)..(771): n is a, c, g, or t
  misc_feature (774)..(774): n is a, c, g, or t
  misc_feature (808)..(808): n is a, c, g, or t
  misc_feature (810)..(811): n is a, c, g, or t
  misc_feature (815)..(817): n is a, c, g, or t
  misc_feature (822)..(822): n is a, c, g, or t
  misc_feature (838)..(838): n is a, c, g, or t
  misc_feature (842)..(842): n is a, c, g, or t
  misc_feature (847)..(847): n is a, c, g, or t
  misc_feature (853)..(853): n is a, c, g, or t
  misc_feature (864)..(864): n is a, c, g, or t
  misc_feature (887)..(889): n is a, c, g, or t
  misc_feature (895)..(895): n is a, c, g, or t
  misc_feature (897)..(897): n is a, c, g, or t
  misc_feature (900)..(900): n is a, c, g, or t
  misc_feature (902)..(902): n is a, c, g, or t
  misc_feature (905)..(905): n is a, c, g, or t
  misc_feature (907)..(907): n is a, c, g, or t
  misc_feature (918)..(918): n is a, c, g, or t
  misc_feature (927)..(927): n is a, c, g, or t
  misc_feature (934)..(934): n is a, c, g, or t
  misc_feature (946)..(946): n is a, c, g, or t
  misc_feature (954)..(954): n is a, c, g, or t
  misc_feature (956)..(956): n is a, c, g, or t
  misc_feature (961)..(961): n is a, c, g, or t
  misc_feature (973)..(973): n is a, c, g, or t
  misc_feature (983)..(983): n is a, c, g, or t
  misc_feature (1002)..(1002): n is a, c, g, or t
  misc_feature (1009)..(1009): n is a, c, g, or t
  misc_feature (1018)..(1018): n is a, c, g, or t
  misc_feature (1029)..(1029): n is a, c, g, or t
  misc_feature (1040)..(1041): n is a, c, g, or t
  misc_feature (1047)..(1047): n is a, c, g, or t
  misc_feature (1049)..(1050): n is a, c, g, or t
  misc_feature (1053)..(1054): n is a, c, g, or t
  misc_feature (1061)..(1061): n is a, c, g, or t
  misc_feature (1071)..(1073): n is a, c, g, or t
  misc_feature (1075)..(1076): n is a, c, g, or t
  misc_feature (1083)..(1083): n is a, c, g, or t
  misc_feature (1090)..(1092): n is a, c, g, or t
  misc_feature (1114)..(1115): n is a, c, g, or t
  misc_feature (1117)..(1117): n is a, c, g, or t
  misc_feature (1127)..(1128): n is a, c, g, or t
  misc_feature (1139)..(1141): n is a, c, g, or t
  misc_feature (1144)..(1144): n is a, c, g, or t
  misc_feature (1147)..(1148): n is a, c, g, or t
  misc_feature (1155)..(1155): n is a, c, g, or t
  misc_feature (1157)..(1157): n is a, c, g, or t
  misc_feature (1159)..(1159): n is a, c, g, or t
  misc_feature (1161)..(1161): n is a, c, g, or t
  misc_feature (1168)..(1169): n is a, c, g, or t
  misc_feature (1172)..(1172): n is a, c, g, or t
  misc_feature (1174)..(1174): n is a, c, g, or t
  misc_feature (1178)..(1178): n is a, c, g, or t
  misc_feature (1185)..(1187): n is a, c, g, or t
  misc_feature (1190)..(1191): n is a, c, g, or t
  misc_feature (1196)..(1196): n is a, c, g, or t
caatagagaaattactatgagaggatcgcatcaccatcaccatcacggatcctatttaggtgacactatagaatcgtcgacccacgcgtccggcaagaatgaggtgctgcgcagcaaggtgtctcggctcacggagcggctccgcaagcgctaccccaccaacaacttcgggaactgcacgggctgctcggccaccttctcagtgctgaagaagaggcggagctgcagtaattgtggaaacagcttctgctctcgatgctgctccttcaaggtgcccaagtcctccatgggggccacagcccctgaagcccagagggagactgtgtttgtgtgtgcctcgtgtaaccagaccttgagcaagtgagaagagaggccagggtccaaccaggcacccgtccttggggccagcantagaccccccactctccccacccctggcccactgtggtgtgtgctgggcaaatgtgncctgaatgctaggtaggcttccccttccttcctcactctctccagctggattctggagctgttctccatccatgagagtggctggcaatggctgctctcaatcccttgagggagaanagcccctgtagggcctggcatgtttgccctgctctgcctggggactgancgagtggacttanggctgggnaggcantanccaccagaaggcancagcgaactaggccaggcctgactggggtntgaanatcagggncantgtggctatgcctgtgnaattccnngaacctgaggttggtgaaaaanagntttttctcctgaaaggtactgggccaaggccctnanncctnnnaaaanccctgcaaaaaaggcnttgngagtncccaanccccatctttnctgaattgaaatgtcccttcaannnaaccangnatntnctntnatttcccccantcagaaggnttgtggnccaggccctaangaaaaccntnggtgnctttctaaaaanccgggttttnaaattccccaaaaatcccnttaaaangaaaaggtnaaaaagagacngttttgggctnnacaccntnnatnngtttaangaaagtaaannntnngggaaancccaatnnnttggacaaaccccttccccccnntnaaaaaccttnntttaaaaattnnncanccnncaaaaantncnanttccccnnatncncttngaaaatnnnacnnggaanttgg

SEQ ID NO: 156 - DNA, 1319 bp, Homo Sapiens
  misc_feature (851)..(851): n is a, c, g, or t
  misc_feature (857)..(857): n is a, c, g, or t
  misc_feature (953)..(953): n is a, c, g, or t
  misc_feature (956)..(956): n is a, c, g, or t
  misc_feature (965)..(965): n is a, c, g, or t
  misc_feature (970)..(970): n is a, c, g, or t
  misc_feature (992)..(992): n is a, c, g, or t
  misc_feature (1002)..(1002): n is a, c, g, or t
  misc_feature (1013)..(1013): n is a, c, g, or t
  misc_feature (1016)..(1016): n is a, c, g, or t
  misc_feature (1022)..(1022): n is a, c, g, or t
  misc_feature (1032)..(1033): n is a, c, g, or t
  misc_feature (1045)..(1045): n is a, c, g, or t
  misc_feature (1048)..(1048): n is a, c, g, or t
  misc_feature (1059)..(1059): n is a, c, g, or t
  misc_feature (1064)..(1064): n is a, c, g, or t
  misc_feature (1073)..(1074): n is a, c, g, or t
  misc_feature (1085)..(1085): n is a, c, g, or t
  misc_feature (1090)..(1090): n is a, c, g, or t
  misc_feature (1110)..(1122): n is a, c, g, or t
  misc_feature (1140)..(1140): n is a, c, g, or t
  misc_feature (1143)..(1143): n is a, c, g, or t
  misc_feature (1159)..(1159): n is a, c, g, or t
  misc_feature (1171)..(1171): n is a, c, g, or t
  misc_feature (1175)..(1175): n is a, c, g, or t
  misc_feature (1181)..(1182): n is a, c, g, or t
  misc_feature (1191)..(1191): n is a, c, g, or t
  misc_feature (1193)..(1193): n is a, c, g, or t
  misc_feature (1196)..(1197): n is a, c, g, or t
  misc_feature (1206)..(1206): n is a, c, g, or t
  misc_feature (1209)..(1209): n is a, c, g, or t
  misc_feature (1219)..(1219): n is a, c, g, or t
  misc_feature (1229)..(1230): n is a, c, g, or t
  misc_feature (1238)..(1238): n is a, c, g, or t
  misc_feature (1241)..(1241): n is a, c, g, or t
  misc_feature (1243)..(1243): n is a, c, g, or t
  misc_feature (1251)..(1251): n is a, c, g, or t
  misc_feature (1253)..(1253): n is a, c, g, or t
  misc_feature (1258)..(1258): n is a, c, g, or t
  misc_feature (1268)..(1268): n is a, c, g, or t
  misc_feature (1274)..(1274): n is a, c, g, or t
  misc_feature (1283)..(1283): n is a, c, g, or t
  misc_feature (1285)..(1286): n is a, c, g, or t
  misc_feature (1290)..(1290): n is a, c, g, or t
  misc_feature (1296)..(1296): n is a, c, g, or t
  misc_feature (1299)..(1300): n is a, c, g, or t
  misc_feature (1303)..(1303): n is a, c, g, or t
  misc_feature (1308)..(1308): n is a, c, g, or t
  misc_feature (1310)..(1310): n is a, c, g, or t
  misc_feature (1313)..(1313): n is a, c, g, or t
  misc_feature (1319)..(1319): n is a, c, g, or t
aatagagaaattactatgagaggatcgcatcaccatcaccatcacggatcctatttaggtgacactatagaatcgtcgacccacgcgtccgatttaaggtggtgctttttttttttgtccttaaaacttgatttttcttaactttattcatgatgccaaagtaaatgaggaaaaaaactcaaaaccagttgagtatcattgcagacaaaactaccagtagtccatattgtttaatattaagttgaataaaataaattttatttcagtcagagcctaaatcacattttgattgtctgaatttttgatactatttttaaaatcatgctagtggcggctgggcgtggtggctcacgcctgtaatcccagcattttgggaggccgaagtgggtggatcacgaggtcgggagttcgagaccagcttggccaaaatggtgaaaccccatctgtactaaaaactacaaaaattggctgggcgcggtggcaggtgcctgtaatcccagctacctgggagtctgaggcaggagaattgcttgaaccctggcgacagaggatgcagtgagccaagatggtgccactgtactccagactgggcgacagagtgagactctgtctcaaaaaaaaaaaaaaaaatcatgctagtgccaagagctactaaattcttaaaaccggcccattggacctgtacagataaaaaatagattcagtgcataatcaaaatatgataattttaaaatcttaagtagaaaaataaatcttgatgttttaaattcttacgaggattcaatagttaatattgatgatctcccggctgggtgcagtggctcacgcctgtaatcccagcagttctggangctgangtgggcgaatcacttcaggccaggagttcaagaccagtctgggcaacatggggaaaacctcgtttctactaaaaatacaaaaattagcccgggcgnggntggcccacncctgntaatcccagctactcaggaagnctaaaaatcncatgaacctangangcaaangttgcaaaanngccaagggctcnccnctgcattccancctgnccaaaaaanngggaaccctgntttcngaaaaaaaaaaaaatttttnnnnnnnnnnnnnggggggggaaaaaaaaanggnaaaaaaaaaaggaccnccaataaaaacntttntccccnnccgggggcngnggnncccccccgntanccccaagggngggggaatanngggggggnccncncccccggncntgggncccggttttnaaaggnatttttttngnnaccncccctnaannggnaaaananggncccccn

SEQ ID NO: 157 - DNA, 1538 bp, Homo Sapiens
  misc_feature (2)..(2): n is a, c, g, or t
  misc_feature (166)..(166): n is a, c, g, or t
  misc_feature (181)..(181): n is a, c, g, or t
  misc_feature (187)..(187): n is a, c, g, or t
  misc_feature (204)..(204): n is a, c, g, or t
  misc_feature (208)..(208): n is a, c, g, or t
  misc_feature (211)..(211): n is a, c, g, or t
  misc_feature (213)..(213): n is a, c, g, or t
  misc_feature (220)..(220): n is a, c, g, or t
  misc_feature (228)..(230): n is a, c, g, or t
  misc_feature (246)..(246): n is a, c, g, or t
  misc_feature (251)..(252): n is a, c, g, or t
  misc_feature (255)..(255): n is a, c, g, or t
  misc_feature (259)..(260): n is a, c, g, or t
  misc_feature (266)..(266): n is a, c, g, or t
  misc_feature (276)..(276): n is a, c, g, or t
  misc_feature (282)..(282): n is a, c, g, or t
  misc_feature (287)..(287): n is a, c, g, or t
  misc_feature (292)..(292): n is a, c, g, or t
  misc_feature (297)..(299): n is a, c, g, or t
  misc_feature (301)..(301): n is a, c, g, or t
  misc_feature (307)..(307): n is a, c, g, or t
  misc_feature (316)..(316): n is a, c, g, or t
  misc_feature (318)..(318): n is a, c, g, or t
  misc_feature (321)..(321): n is a, c, g, or t
  misc_feature (323)..(323): n is a, c, g, or t
  misc_feature (325)..(325): n is a, c, g, or t
  misc_feature (327)..(327): n is a, c, g, or t
  misc_feature (329)..(329): n is a, c, g, or t
  misc_feature (332)..(332): n is a, c, g, or t
  misc_feature (338)..(338): n is a, c, g, or t
  misc_feature (346)..(346): n is a, c, g, or t
  misc_feature (353)..(353): n is a, c, g, or t
  misc_feature (356)..(356): n is a, c, g, or t
  misc_feature (359)..(359): n is a, c, g, or t
  misc_feature (366)..(367): n is a, c, g, or t
  misc_feature (373)..(373): n is a, c, g, or t
  misc_feature (377)..(377): n is a, c, g, or t
  misc_feature (381)..(381): n is a, c, g, or t
  misc_feature (383)..(383): n is a, c, g, or t
  misc_feature (385)..(386): n is a, c, g, or t
  misc_feature (389)..(390): n is a, c, g, or t
  misc_feature (392)..(392): n is a, c, g, or t
  misc_feature (398)..(398): n is a, c, g, or t
  misc_feature (404)..(404): n is a, c, g, or t
  misc_feature (406)..(406): n is a, c, g, or t
  misc_feature (408)..(410): n is a, c, g, or t
  misc_feature (413)..(413): n is a, c, g, or t
  misc_feature (417)..(417): n is a, c, g, or t
  misc_feature (420)..(420): n is a, c, g, or t
  misc_feature (429)..(429): n is a, c, g, or t
  misc_feature (438)..(438): n is a, c, g, or t
  misc_feature (444)..(445): n is a, c, g, or t
  misc_feature (447)..(447): n is a, c, g, or t
  misc_feature (450)..(450): n is a, c, g, or t
  misc_feature (453)..(453): n is a, c, g, or t
  misc_feature (458)..(458): n is a, c, g, or t
  misc_feature (462)..(464): n is a, c, g, or t
  misc_feature (466)..(467): n is a, c, g, or t
  misc_feature (470)..(470): n is a, c, g, or t
  misc_feature (472)..(474): n is a, c, g, or t
  misc_feature (479)..(480): n is a, c, g, or t
  misc_feature (483)..(483): n is a, c, g, or t
  misc_feature (487)..(488): n is a, c, g, or t
  misc_feature (492)..(492): n is a, c, g, or t
  misc_feature (501)..(501): n is a, c, g, or t
  misc_feature (512)..(512): n is a, c, g, or t
  misc_feature (515)..(515): n is a, c, g, or t
  misc_feature (518)..(518): n is a, c, g, or t
  misc_feature (522)..(523): n is a, c, g, or t
  misc_feature (525)..(526): n is a, c, g, or t
  misc_feature (532)..(535): n is a, c, g, or t
  misc_feature (538)..(538): n is a, c, g, or t
  misc_feature (542)..(542): n is a, c, g, or t
  misc_feature (548)..(549): n is a, c, g, or t
  misc_feature (552)..(555): n is a, c, g, or t
  misc_feature (557)..(559): n is a, c, g, or t
  misc_feature (561)..(562): n is a, c, g, or t
  misc_feature (569)..(569): n is a, c, g, or t
  misc_feature (574)..(574): n is a, c, g, or t
  misc_feature (577)..(577): n is a, c, g, or t
  misc_feature (580)..(580): n is a, c, g, or t
  misc_feature (584)..(584): n is a, c, g, or t
  misc_feature (589)..(590): n is a, c, g, or t
  misc_feature (593)..(593): n is a, c, g, or t
  misc_feature (596)..(596): n is a, c, g, or t
  misc_feature (600)..(600): n is a, c, g, or t
  misc_feature (614)..(614): n is a, c, g, or t
  misc_feature (623)..(623): n is a, c, g, or t
  misc_feature (625)..(626): n is a, c, g, or t
  misc_feature (630)..(630): n is a, c, g, or t
  misc_feature (639)..(641): n is a, c, g, or t
  misc_feature (644)..(644): n is a, c, g, or t
  misc_feature (653)..(653): n is a, c, g, or t
  misc_feature (658)..(658): n is a, c, g, or t
  misc_feature (662)..(662): n is a, c, g, or t
  misc_feature (666)..(666): n is a, c, g, or t
  misc_feature (671)..(671): n is a, c, g, or t
  misc_feature (674)..(675): n is a, c, g, or t
  misc_feature (683)..(685): n is a, c, g, or t
  misc_feature (702)..(702): n is a, c, g, or t
  misc_feature (709)..(710): n is a, c, g, or t
  misc_feature (717)..(717): n is a, c, g, or t
  misc_feature (719)..(720): n is a, c, g, or t
  misc_feature (726)..(726): n is a, c, g, or t
  misc_feature (728)..(728): n is a, c, g, or t
  misc_feature (732)..(732): n is a, c, g, or t
  misc_feature (734)..(736): n is a, c, g, or t
  misc_feature (740)..(740): n is a, c, g, or t
  misc_feature (743)..(743): n is a, c, g, or t
  misc_feature (754)..(754): n is a, c, g, or t
  misc_feature (757)..(757): n is a, c, g, or t
  misc_feature (759)..(760): n is a, c, g, or t
  misc_feature (765)..(765): n is a, c, g, or t
  misc_feature (767)..(770): n is a, c, g, or t
  misc_feature (774)..(774): n is a, c, g, or t
  misc_feature (781)..(781): n is a, c, g, or t
  misc_feature (789)..(789): n is a, c, g, or t
  misc_feature (797)..(797): n is a, c, g, or t
  misc_feature (801)..(801): n is a, c, g, or t
  misc_feature (803)..(803): n is a, c, g, or t
  misc_feature (806)..(806): n is a, c, g, or t
  misc_feature (811)..(811): n is a, c, g, or t
  misc_feature (814)..(814): n is a, c, g, or t
  misc_feature (817)..(818): n is a, c, g, or t
  misc_feature (822)..(822): n is a, c, g, or t
  misc_feature (826)..(827): n is a, c, g, or t
  misc_feature (833)..(833): n is a, c, g, or t
  misc_feature (838)..(838): n is a, c, g, or t
  misc_feature (842)..(842): n is a, c, g, or t
  misc_feature (849)..(849): n is a, c, g, or t
  misc_feature (852)..(852): n is a, c, g, or t
  misc_feature (854)..(855): n is a, c, g, or t
  misc_feature (857)..(857): n is a, c, g, or t
  misc_feature (865)..(866): n is a, c, g, or t
  misc_feature (881)..(881): n is a, c, g, or t
  misc_feature (886)..(886): n is a, c, g, or t
  misc_feature (890)..(890): n is a, c, g, or t
  misc_feature (892)..(892): n is a, c, g, or t
  misc_feature (895)..(896): n is a, c, g, or t
  misc_feature (898)..(899): n is a, c, g, or t
  misc_feature (902)..(902): n is a, c, g, or t
  misc_feature (904)..(904): n is a, c, g, or t
  misc_feature (907)..(907): n is a, c, g, or t
  misc_feature (913)..(913): n is a, c, g, or t
  misc_feature (916)..(917): n is a, c, g, or t
  misc_feature (919)..(919): n is a, c, g, or t
  misc_feature (927)..(927): n is a, c, g, or t
  misc_feature (930)..(930): n is a, c, g, or t
  misc_feature (933)..(934): n is a, c, g, or t
  misc_feature (938)..(940): n is a, c, g, or t
  misc_feature (942)..(942): n is a, c, g, or t
  misc_feature (944)..(945): n is a, c, g, or t
  misc_feature (947)..(948): n is a, c, g, or t
  misc_feature (950)..(950): n is a, c, g, or t
  misc_feature (953)..(953): n is a, c, g, or t
  misc_feature (956)..(956): n is a, c, g, or t
  misc_feature (959)..(959): n is a, c, g, or t
  misc_feature (962)..(962): n is a, c, g, or t
  misc_feature (965)..(966): n is a, c, g, or t
  misc_feature (968)..(968): n is a, c, g, or t
  misc_feature (972)..(972): n is a, c, g, or t
  misc_feature (974)..(974): n is a, c, g, or t
  misc_feature (983)..(983): n is a, c, g, or t
  misc_feature (989)..(989): n is a, c, g, or t
  misc_feature (993)..(993): n is a, c, g, or t
  misc_feature (996)..(996): n is a, c, g, or t
  misc_feature (1004)..(1005): n is a, c, g, or t
  misc_feature (1007)..(1007): n is a, c, g, or t
  misc_feature (1012)..(1012): n is a, c, g, or t
  misc_feature (1015)..(1015): n is a, c, g, or t
  misc_feature (1029)..(1029): n is a, c, g, or t
  misc_feature (1034)..(1034): n is a, c, g, or t
  misc_feature (1041)..(1041): n is a, c, g, or t
  misc_feature (1051)..(1051): n is a, c, g, or t
  misc_feature (1055)..(1055): n is a, c, g, or t
  misc_feature (1062)..(1064): n is a, c, g, or t
  misc_feature (1068)..(1068): n is a, c, g, or t
  misc_feature (1070)..(1070): n is a, c, g, or t
  misc_feature (1075)..(1076): n is a, c, g, or t
  misc_feature (1082)..(1082): n is a, c, g, or t
  misc_feature (1086)..(1086): n is a, c, g, or t
  misc_feature (1098)..(1099): n is a, c, g, or t
  misc_feature (1110)..(1110): n is a, c, g, or t
  misc_feature (1115)..(1117): n is a, c, g, or t
  misc_feature (1124)..(1125): n is a, c, g, or t
  misc_feature (1131)..(1131): n is a, c, g, or t
  misc_feature (1136)..(1137): n is a, c, g, or t
  misc_feature (1139)..(1141): n is a, c, g, or t
  misc_feature (1143)..(1143): n is a, c, g, or t
  misc_feature (1148)..(1148): n is a, c, g, or t
  misc_feature (1157)..(1157): n is a, c, g, or t
  misc_feature (1159)..(1160): n is a, c, g, or t
  misc_feature (1162)..(1163): n is a, c, g, or t
  misc_feature (1165)..(1166): n is a, c, g, or t
  misc_feature (1170)..(1170): n is a, c, g, or t
  misc_feature (1173)..(1173): n is a, c, g, or t
  misc_feature (1176)..(1176): n is a, c, g, or t
  misc_feature (1178)..(1178): n is a, c, g, or t
  misc_feature (1180)..(1180): n is a, c, g, or t
  misc_feature (1183)..(1183): n is a, c, g, or t
  misc_feature (1187)..(1188): n is a, c, g, or t
  misc_feature (1192)..(1195): n is a, c, g, or t
  misc_feature (1198)..(1201): n is a, c, g, or t
  misc_feature (1207)..(1207): n is a, c, g, or t
  misc_feature (1210)..(1210): n is a, c, g, or t
  misc_feature (1215)..(1216): n is a, c, g, or t
  misc_feature (1220)..(1221): n is a, c, g, or t
  misc_feature (1223)..(1223): n is a, c, g, or t
  misc_feature (1227)..(1228): n is a, c, g, or t
  misc_feature (1230)..(1230): n is a, c, g, or t
  misc_feature (1235)..(1235): n is a, c, g, or t
  misc_feature (1237)..(1237): n is a, c, g, or t
  misc_feature (1244)..(1244): n is a, c, g, or t
  misc_feature (1249)..(1249): n is a, c, g, or t
  misc_feature (1251)..(1251): n is a, c, g, or t
  misc_feature (1253)..(1253): n is a, c, g, or t
  misc_feature (1255)..(1255): n is a, c, g, or t
  misc_feature (1258)..(1258): n is a, c, g, or t
  misc_feature (1262)..(1262): n is a, c, g, or t
  misc_feature (1267)..(1268): n is a, c, g, or t
  misc_feature (1270)..(1270): n is a, c, g, or t
  misc_feature (1275)..(1275): n is a, c, g, or t
  misc_feature (1278)..(1278): n is a, c, g, or t
  misc_feature (1284)..(1284): n is a, c, g, or t
  misc_feature (1287)..(1287): n is a, c, g, or t
  misc_feature (1289)..(1290): n is a, c, g, or t
  misc_feature (1296)..(1296): n is a, c, g, or t
  misc_feature (1307)..(1307): n is a, c, g, or t
  misc_feature (1309)..(1309): n is a, c, g, or t
  misc_feature (1311)..(1314): n is a, c, g, or t
  misc_feature (1316)..(1316): n is a, c, g, or t
  misc_feature (1321)..(1321): n is a, c, g, or t
  misc_feature (1325)..(1327): n is a, c, g, or t
  misc_feature (1343)..(1343): n is a, c, g, or t
  misc_feature (1350)..(1351): n is a, c, g, or t
  misc_feature (1353)..(1354): n is a, c, g, or t
  misc_feature (1362)..(1363): n is a, c, g, or t
  misc_feature (1365)..(1365): n is a, c, g, or t
  misc_feature (1370)..(1371): n is a, c, g, or t
  misc_feature (1385)..(1385): n is a, c, g, or t
  misc_feature (1387)..(1387): n is a, c, g, or t
  misc_feature (1389)..(1389): n is a, c, g, or t
  misc_feature (1396)..(1397): n is a, c, g, or t
  misc_feature (1401)..(1401): n is a, c, g, or t
  misc_feature (1408)..(1409): n is a, c, g, or t
  misc_feature (1411)..(1415): n is a, c, g, or t
  misc_feature (1417)..(1417): n is a, c, g, or t
  misc_feature (1421)..(1421): n is a, c, g, or t
  misc_feature (1429)..(1429): n is a, c, g, or t
  misc_feature (1434)..(1434): n is a, c, g, or t
  misc_feature (1439)..(1440): n is a, c, g, or t
  misc_feature (1445)..(1445): n is a, c, g, or t
  misc_feature (1447)..(1448): n is a, c, g, or t
  misc_feature (1451)..(1451): n is a, c, g, or t
  misc_feature (1453)..(1454): n is a, c, g, or t
  misc_feature (1456)..(1456): n is a, c, g, or t
  misc_feature (1459)..(1460): n is a, c, g, or t
  misc_feature (1462)..(1462): n is a, c, g, or t
  misc_feature (1469)..(1470): n is a, c, g, or t
  misc_feature (1473)..(1474): n is a, c, g, or t
  misc_feature (1476)..(1476): n is a, c, g, or t
  misc_feature (1480)..(1480): n is a, c, g, or t
  misc_feature (1483)..(1483): n is a, c, g, or t
  misc_feature (1493)..(1493): n is a, c, g, or t
  misc_feature (1495)..(1495): n is a, c, g, or t
  misc_feature (1498)..(1498): n is a, c, g, or t
  misc_feature (1505)..(1505): n is a, c, g, or t
  misc_feature (1511)..(1511): n is a, c, g, or t
  misc_feature (1513)..(1514): n is a, c, g, or t
  misc_feature (1517)..(1517): n is a, c, g, or t
  misc_feature (1519)..(1519): n is a, c, g, or t
  misc_feature (1521)..(1521): n is a, c, g, or t
  misc_feature (1526)..(1527): n is a, c, g, or t
  misc_feature (1531)..(1533): n is a, c, g, or t
  misc_feature (1537)..(1537): n is a, c, g, or t
antagagagattactatgagaggatcgcatcaccatcaccatcacgggatcctatttaggtgacactatagaatcgtcgacccacgcgtccggtcgccatgttgtcggtagcagcccgctcgggcccgttcgcgcccgtcctgtcggccacgtcccgcggggtggngggcgcgctgcggcncttggngcaggccacggtgcccncaancangngggatgnggaagttnnnttattgataacaatcnttatnntanattnnatttancaactaattnaggaanaatgntgcanaattnnnangaatanatgacccantntangntnanancancaacanaaaccaancggtganaanagnatttatnntaaaantaanaatnantnnagnnanaaaaantgaatnanannntanaaanaanaaaaacganaataatatnataaanntnaanatntttanatannnannaanannntattnnaantcannatanatatgtaanataaaattttnttnttnattnnannaaaaannnnttnaaanaatatnnaannnntnnntnnataattntaatnaanttnatanaacannaanaantctnaatttaataaaaantaaaataanannatanctataaaannnttnaaattaaanattantgtnaaanaatcnttnnaaaaattnnntaaaatatctaaattcntattttnnaaactanannaaaatnantttncnnntatnatnattaattaatnatntnnattanannnnatanattaaantaaatttntatattanaaantntantaaanatnatnnaaanatannattatnttctntttnaattcanaananntntaaactannatatttaatatttanatttnatcntnatnnannaantnatntatttnttnntnataaaaanttnaanntaannnananntnnanttnaanttnttnaannanatananaaaaatttnaaatantttntantaaatatnntnttttnctnattaaataaaatantttantataaanttattttttnattnctaattnnntaananaaaannaatatntaanaatattatttanntatattatatnttttnnntttaaanntaatanttttnntnnntntattnattaatttncnnanntnnaatnatnatnananaanaatnntatnnnnttnnnnactttnttnttttnnaatnntnaaannanttaancntatttanatatntncntnaanatanaaaannantaaantanatacanatnannttaatntattttcttananannnnantaatnattnnncttttaaaatttatanttaatannannattttatnnanttaannatctttaattaatnantntaaattnntaantcatatnnannnnnantaantaattatnataanttatnntatantnnaantnntnaanntnatttaannaannanttantanatttaactananaanaaaatanatttanannaantnanccaanntaannntaana

SEQ ID NO: 158 - DNA, 1200 bp, Homo Sapiens
  misc_feature (1)..(1): n is a, c, g, or t
  misc_feature (935)..(935): n is a, c, g, or t
  misc_feature (977)..(977): n is a, c, g, or t
  misc_feature (990)..(990): n is a, c, g, or t
  misc_feature (1006)..(1006): n is a, c, g, or t
  misc_feature (1021)..(1021): n is a, c, g, or t
  misc_feature (1026)..(1026): n is a, c, g, or t
  misc_feature (1038)..(1038): n is a, c, g, or t
  misc_feature (1058)..(1058): n is a, c, g, or t
  misc_feature (1069)..(1069): n is a, c, g, or t
  misc_feature (1071)..(1071): n is a, c, g, or t
  misc_feature (1073)..(1073): n is a, c, g, or t
  misc_feature (1076)..(1076): n is a, c, g, or t
  misc_feature (1082)..(1082): n is a, c, g, or t
  misc_feature (1087)..(1087): n is a, c, g, or t
  misc_feature (1090)..(1090): n is a, c, g, or t
  misc_feature (1098)..(1098): n is a, c, g, or t
  misc_feature (1108)..(1108): n is a, c, g, or t
  misc_feature (1120)..(1120): n is a, c, g, or t
  misc_feature (1126)..(1126): n is a, c, g, or t
  misc_feature (1136)..(1136): n is a, c, g, or t
  misc_feature (1140)..(1140): n is a, c, g, or t
  misc_feature (1146)..(1146): n is a, c, g, or t
  misc_feature (1149)..(1149): n is a, c, g, or t
  misc_feature (1159)..(1159): n is a, c, g, or t
  misc_feature (1165)..(1165): n is a, c, g, or t
  misc_feature (1167)..(1167): n is a, c, g, or t
  misc_feature (1171)..(1171): n is a, c, g, or t
  misc_feature (1191)..(1191): n is a, c, g, or t
naattagagaaattactatgagaggatcgcatcaccatcaccatcacggatcctatttaggtgacactatagaatcgtcgacccacgcgtccgcagcaactgatgaaaagttacagaattttgctattgaaaatactccagtttgcttttctcataattcctctctgagttctctcagtgacattgaccaagaaaacaacaataaagaaaatgaacctatcaaagagactgagccccctgactcacagggagaaccaagtaaacctcaagcatcaggctatgctcctaaatcatttcatgttgaagataccccagtttgtttctcaagaaacagttctctcagttctcttagtattgactctgaagatgacctgttgcaggaatgtataagctccgcaatgccaaaaaagaaaaagccttcaagactcaagggtgataatgaaaaacatagtcccagaaatatgggtggcatattaggtgaagatctgacacttgatttgaaagatatacagagaccagattcagaacatggtctatcccctgattcagaaaattttgattggaaagctattcaggaaggtgcaaattccatagtaagtagtttacatcaagctgctgctgctgcatgtttatctagacaagcttcgtctgattcagattccatcctttccctgaaatcaggaatctctctgggatcaccatttcatcttacacctgatcaagaagaaaaaccctttacaagtaataaaggcccacgaattctaaaaccaggggagaaaagtacattggaaactaaaaagatagaatctgaaagtaaaggaatcaaaggaggaaaaaagtttataaaagtttgattactggaaaagttcgatctaattcagaaatttcaggccaaatgaaacagccccttcagccctagtgaaggtcaacagccnccacttctcctagaggagccagccatctgtgaatcaaattangcctggtgccagncaaactcccaaaaggngggtcagtaagcccntctanatcaggatctanagattcgaccccttcagacnggccggcaccntnantanacctanacgtnccngggcgaantcatttcccnggaaaaaggaanagtccnccaacaaatntccnacttcnagnactccccccnaaacgntncacnaatccccggtcgggaaaggnctaacttcc

SEQ ID NO: 159 - DNA, 1200 bp, Homo Sapiens
  misc_feature (1)..(1): n is a, c, g, or t
  misc_feature (3)..(3): n is a, c, g, or t
  misc_feature (889)..(889): n is a, c, g, or t
  misc_feature (927)..(927): n is a, c, g, or t
  misc_feature (1002)..(1002): n is a, c, g, or t
  misc_feature (1005)..(1005): n is a, c, g, or t
  misc_feature (1023)..(1023): n is a, c, g, or t
  misc_feature (1027)..(1027): n is a, c, g, or t
  misc_feature (1045)..(1045): n is a, c, g, or t
  misc_feature (1054)..(1054): n is a, c, g, or t
  misc_feature (1056)..(1056): n is a, c, g, or t
  misc_feature (1059)..(1059): n is a, c, g, or t
  misc_feature (1069)..(1069): n is a, c, g, or t
  misc_feature (1077)..(1077): n is a, c, g, or t
  misc_feature (1081)..(1082): n is a, c, g, or t
  misc_feature (1092)..(1093): n is a, c, g, or t
  misc_feature (1095)..(1095): n is a, c, g, or t
  misc_feature (1099)..(1099): n is a, c, g, or t
  misc_feature (1103)..(1103): n is a, c, g, or t
  misc_feature (1106)..(1106): n is a, c, g, or t
  misc_feature (1113)..(1113): n is a, c, g, or t
  misc_feature (1125)..(1125): n is a, c, g, or t
  misc_feature (1141)..(1141): n is a, c, g, or t
  misc_feature (1158)..(1158): n is a, c, g, or t
  misc_feature (1174)..(1174): n is a, c, g, or t
  misc_feature (1187)..(1187): n is a, c, g, or t
  misc_feature (1195)..(1195): n is a, c, g, or t
nantagagaaattactatgagaggatcgcatcaccatcaccatcacggatcctatttaggtgacactatagaatcgtcgacccacgcgtccgattcattcaccatccaggcctatgattgtgggaagggacctgatggcaccaacgtgaaaaagtctcataaagcaactgttcatattcaggtgaacgacgtgaatgagtacgcgcccgtgttcaaggagaagtcctacaaagccacggtcatcgaggggaagcagtacgacagcattttgagggtggaggccgtggatgccgactgctcccctcagttcagccagatttgcagctacgaaatcatcactccagacgtgccctttactgttgacaaagatggttatataaaaaacacagagaaattaaactacgggaaagaacatcaatataagctgaccgtcactgcctatgactgtgggaagaaaagagccacagaagatgttttggtgaagatcagcattaagcccacctgcacccctgggtggcaaggatggaacaacaggattgagtatgagccgggcaccggcgcgttggccgtctttccaaatatccacctggagacatgtgacgagccagtcgcctcagtacaggccacagtggagctagaaaccagccacatagggaaaggctgcgaccgagacacctactcagagaagtccctccaccggctctgtggtgcggccgctccctatagtgagtcgtattaagcttaattagctgagcttggactcctgttgatagatccagtaatgacctcagaactccatctggatttgttcagaacgctcggttgccgccgggcgtttttttattggtgagaatccaagctagcttggcgagattttcaggagctaagnaagctaaaatggagaaaaaaatcactggatataccacngttgatatatcccaatggcatcgtaaagaacattttgaggcatttcagtcagttgctcaatgtacctataaccanacngttcagctggaaattacngccntttttaaaaaccgtaaanaaaaataancncangttttatccnggcctttnttcnnattcttgccnncntgangaangcnctcccgnaattcctatggnattgaaaaacgggganctggggaattgggaaanggttcccccttgtacncgttttcctgaanaactgaangtttt

SEQ ID NO: 160 - DNA, 1325 bp, Homo Sapiens
  misc_feature (807)..(807): n is a, c, g, or t
  misc_feature (834)..(834): n is a, c, g, or t
  misc_feature (905)..(905): n is a, c, g, or t
  misc_feature (932)..(932): n is a, c, g, or t
  misc_feature (937)..(937): n is a, c, g, or t
  misc_feature (952)..(952): n is a, c, g, or t
  misc_feature (974)..(1015): n is a, c, g, or t
  misc_feature (1018)..(1021): n is a, c, g, or t
  misc_feature (1026)..(1026): n is a, c, g, or t
  misc_feature (1031)..(1031): n is a, c, g, or t
  misc_feature (1033)..(1033): n is a, c, g, or t
  misc_feature (1037)..(1037): n is a, c, g, or t
  misc_feature (1040)..(1040): n is a, c, g, or t
  misc_feature (1043)..(1043): n is a, c, g, or t
  misc_feature (1050)..(1050): n is a, c, g, or t
  misc_feature (1052)..(1052): n is a, c, g, or t
  misc_feature (1054)..(1054): n is a, c, g, or t
  misc_feature (1056)..(1056): n is a, c, g, or t
  misc_feature (1062)..(1063): n is a, c, g, or t
  misc_feature (1074)..(1074): n is a, c, g, or t
  misc_feature (1076)..(1077): n is a, c, g, or t
  misc_feature (1082)..(1082): n is a, c, g, or t
  misc_feature (1087)..(1088): n is a, c, g, or t
  misc_feature (1091)..(1091): n is a, c, g, or t
  misc_feature (1093)..(1093): n is a, c, g, or t
  misc_feature (1096)..(1096): n is a, c, g, or t
  misc_feature (1102)..(1102): n is a, c, g, or t
  misc_feature (1107)..(1110): n is a, c, g, or t
  misc_feature (1114)..(1114): n is a, c, g, or t
  misc_feature (1130)..(1130): n is a, c, g, or t
  misc_feature (1132)..(1132): n is a, c, g, or t
  misc_feature (1135)..(1135): n is a, c, g, or t
  misc_feature (1141)..(1141): n is a, c, g, or t
  misc_feature (1145)..(1146): n is a, c, g, or t
  misc_feature (1159)..(1159): n is a, c, g, or t
  misc_feature (1167)..(1168): n is a, c, g, or t
  misc_feature (1170)..(1174): n is a, c, g, or t
  misc_feature (1177)..(1177): n is a, c, g, or t
  misc_feature (1180)..(1180): n is a, c, g, or t
  misc_feature (1192)..(1194): n is a, c, g, or t
  misc_feature (1196)..(1196): n is a, c, g, or t
  misc_feature (1201)..(1201): n is a, c, g, or t
  misc_feature (1203)..(1203): n is a, c, g, or t
  misc_feature (1206)..(1207): n is a, c, g, or t
  misc_feature (1218)..(1219): n is a, c, g, or t
  misc_feature (1222)..(1222): n is a, c, g, or t
  misc_feature (1226)..(1228): n is a, c, g, or t
  misc_feature (1233)..(1236): n is a, c, g, or t
  misc_feature (1241)..(1241): n is a, c, g, or t
  misc_feature (1244)..(1245): n is a, c, g, or t
  misc_feature (1261)..(1261): n is a, c, g, or t
  misc_feature (1265)..(1266): n is a, c, g, or t
  misc_feature (1269)..(1275): n is a, c, g, or t
  misc_feature (1277)..(1277): n is a, c, g, or t
  misc_feature (1280)..(1281): n is a, c, g, or t
  misc_feature (1283)..(1284): n is a, c, g, or t
  misc_feature (1286)..(1286): n is a, c, g, or t
  misc_feature (1290)..(1292): n is a, c, g, or t
  misc_feature (1295)..(1297): n is a, c, g, or t
  misc_feature (1299)..(1300): n is a, c, g, or t
  misc_feature (1303)..(1305): n is a, c, g, or t
  misc_feature (1308)..(1308): n is a, c, g, or t
  misc_feature (1310)..(1310): n is a, c, g, or t
  misc_feature (1314)..(1314): n is a, c, g, or t
  misc_feature (1319)..(1319): n is a, c, g, or t
aatagagaaattactatgagaggatcgcatcaccatcaccatcacggatcctatttaggtgacactatagaatcgtcgacccacgcgtccgccaagatggcggatgaagccacgcgacgtgttgtgtctgagatcccggtgctgaagactaacgccggaccccgagatcgtgagttgtgggtgcagcgactgaaggaggaatatcagtcccttatccggtatgtggagaacaacaagaatgctgacaacgattggttccgactggagtccaacaaggaaggaactcggtggtttggaaaatgctggtatatccatgacctcctgaaatatgagtttgacatcgagtttgacattcctatcacatatcctactactgccccagaaattgcagttcctgagctggatggaaagacagcaaagatgtacaggggtggcaaaatatgcctgacggatcatttcaaacctttgtgggccaggaatgtgcccaaatttggactagctcatctcatggctctggggctgggtccatggctggcagtggaaatccctgatctgattcagaagggcgtcatccaacacaaagagaaatgcaaccaatgaagaatcaagccactgaggcagggcagagggacctttgataggctacgatactattttcctgtgcatcacacttaactcatctaactgcttccccggacaccctccacctctagttgttactaagtagctgcagtaggcattgctggggaagaaacaaacacacaccaaacagtactgctacttagtttctaaggctgcacagggaanggaaagactgggctttggacaatctanaggtaatttatatccgcccccaggtggagcaacatgcgattctggaggcacggggggtaactgaaagtgantacatatagtctttctggtttctgganaaaancccatcaataaaaanctgcttcctctggtaaaaaaannnnnnnnnnnnnnnnnnnnnnnnnnnnnnnnnnnnnnnnnnggnnnnccccnccctnangggnccnaanaaacctnantnanctgaannttgaaccccgntnnaaaantcccnnaangnccnccaaanccccnnnngganttttttcaaaaccctngnttncccccngggnntttttttttgggnaaaacccnncnnnnnttnggnaaattttcgggnnnanggaancnaannggaaaaaaaannccnggannnccccnnnnaaatnccnnggcccaaaaaaatttngggnnttnnnnnnntnccnngnncnaaannnacnnncnnggnnnacncntttnaaacnaaaaaa

SEQ ID NO: 161 - DNA, 1320 bp, Homo Sapiens
  misc_feature (882)..(882): n is a, c, g, or t
  misc_feature (920)..(920): n is a, c, g, or t
  misc_feature (943)..(943): n is a, c, g, or t
  misc_feature (959)..(959): n is a, c, g, or t
  misc_feature (965)..(965): n is a, c, g, or t
  misc_feature (972)..(972): n is a, c, g, or t
  misc_feature (986)..(986): n is a, c, g, or t
  misc_feature (1020)..(1020): n is a, c, g, or t
  misc_feature (1023)..(1023): n is a, c, g, or t
  misc_feature (1033)..(1033): n is a, c, g, or t
  misc_feature (1039)..(1039): n is a, c, g, or t
  misc_feature (1043)..(1043): n is a, c, g, or t
  misc_feature (1046)..(1046): n is a, c, g, or t
  misc_feature (1056)..(1056): n is a, c, g, or t
  misc_feature (1060)..(1061): n is a, c, g, or t
  misc_feature (1070)..(1070): n is a, c, g, or t
  misc_feature (1073)..(1073): n is a, c, g, or t
  misc_feature (1085)..(1085): n is a, c, g, or t
  misc_feature (1091)..(1091): n is a, c, g, or t
  misc_feature (1094)..(1094): n is a, c, g, or t
  misc_feature (1097)..(1097): n is a, c, g, or t
  misc_feature (1108)..(1108): n is a, c, g, or t
  misc_feature (1112)..(1112): n is a, c, g, or t
  misc_feature (1115)..(1115): n is a, c, g, or t
  misc_feature (1117)..(1117): n is a, c, g, or t
  misc_feature (1123)..(1123): n is a, c, g, or t
  misc_feature (1129)..(1129): n is a, c, g, or t
  misc_feature (1134)..(1134): n is a, c, g, or t
  misc_feature (1144)..(1144): n is a, c, g, or t
  misc_feature (1151)..(1151): n is a, c, g, or t
  misc_feature (1155)..(1155): n is a, c, g, or t
  misc_feature (1158)..(1158): n is a, c, g, or t
  misc_feature (1166)..(1167): n is a, c, g, or t
  misc_feature (1171)..(1171): n is a, c, g, or t
  misc_feature (1174)..(1174): n is a, c, g, or t
  misc_feature (1177)..(1177): n is a, c, g, or t
  misc_feature (1179)..(1179): n is a, c, g, or t
  misc_feature (1181)..(1181): n is a, c, g, or t
  misc_feature (1183)..(1183): n is a, c, g, or t
  misc_feature (1202)..(1202): n is a, c, g, or t
  misc_feature (1210)..(1210): n is a, c, g, or t
  misc_feature (1214)..(1214): n is a, c, g, or t
  misc_feature (1227)..(1227): n is a, c, g, or t
  misc_feature (1229)..(1231): n is a, c, g, or t
  misc_feature (1233)..(1234): n is a, c, g, or t
  misc_feature (1240)..(1243): n is a, c, g, or t
  misc_feature (1257)..(1257): n is a, c, g, or t
  misc_feature (1265)..(1266): n is a, c, g, or t
  misc_feature (1268)..(1270): n is a, c, g, or t
  misc_feature (1274)..(1274): n is a, c, g, or t
  misc_feature (1279)..(1281): n is a, c, g, or t
  misc_feature (1283)..(1283): n is a, c, g, or t
  misc_feature (1293)..(1296): n is a, c, g, or t
  misc_feature (1305)..(1308): n is a, c, g, or t
  misc_feature (1311)..(1313): n is a, c, g, or t
  misc_feature (1319)..(1320): n is a, c, g, or t
aatagagaaattagtatgagaggatcgcatcaccatcaccatcacggatcctatttaggtgacactatagaatcgtcgacccacgcgtccgcccacgcgtccgcccacgcgtccggtcatcagcagctgcctgctggaattcttcccatggtgcccgaggtcgcccaggctgtaggagttagtcaaggacatcacaccaaagattttaccagggcagctccgaatcctgccaaggccacggtaactgccatgatagcccgagagttgttgtatgggggcacctcgcccacagccgagaccattttaaagaataacatctcttcaggccacgtaccccatggacctctcacgagaccctctgagcaactggactatctttccagagtccagggattccaggttgaatacaaagacttccccaaaaacaacaagaacgaatttgtatctcttatcaattgctcctctcagccacctctgatcagccatggtatcggcaaggatgtggagtcctgccatgatatggctgcgctgaacatcttaaagttgctgtctgagttggaccaacaaagtacagagatgccaagaacaggaaacggaccaatgtctgtgtgtgggaggtgctgaaccttttctggccatgaaccattataaaatcccaacatatatactgaaaatactgaaactgctttgaaaatttggaatttctgatacctccagtgggccgagagacacggtgggtaaaggatgtgggcagcagcagggaagacaacagaaacacaaggaggcggctgtggccgggctggactgtgctggggtttgttgtgatggccactcggtgacctggcggtccctacgcaatagcagctgcctgtggggaagaanggctgcccagccagctggttctcccgggacaccagcanatccacaccctgggcacctccgngttgggtctttttttnccctgngtgaaanaaaaacggcacgancccttctcagctggctcactcaaaacattggganaancctggaagcntgccanaaanagnctttgacggncccnnagctaagcnccnaaaaatcaatgnttctantcncgngaccaattttntagnggncnggcccncacctntgganacccaacatnccaaggntttnttncaaagggnngggntcnaantncnanttttttttggggaaggacnaaaaaaantttntttggaattcccntnnncnnaaaaannnnttggaattttgganggtttttnnannncccnaaaannncngggggggggnnnnttttttttnnnnccnnnttttgnn

SEQ ID NO: 162 - DNA, 1286 bp, Homo Sapiens
  misc_feature (844)..(859): n is a, c, g, or t
  misc_feature (861)..(861): n is a, c, g, or t
  misc_feature (863)..(863): n is a, c, g, or t
  misc_feature (865)..(866): n is a, c, g, or t
  misc_feature (871)..(871): n is a, c, g, or t
  misc_feature (912)..(912): n is a, c, g, or t
  misc_feature (917)..(917): n is a, c, g, or t
  misc_feature (934)..(934): n is a, c, g, or t
  misc_feature (936)..(936): n is a, c, g, or t
  misc_feature (995)..(995): n is a, c, g, or t
  misc_feature (1037)..(1039): n is a, c, g, or t
  misc_feature (1046)..(1046): n is a, c, g, or t
  misc_feature (1050)..(1050): n is a, c, g, or t
  misc_feature (1083)..(1083): n is a, c, g, or t
  misc_feature (1085)..(1085): n is a, c, g, or t
  misc_feature (1087)..(1087): n is a, c, g, or t
  misc_feature (1099)..(1099): n is a, c, g, or t
  misc_feature (1109)..(1109): n is a, c, g, or t
  misc_feature (1119)..(1119): n is a, c, g, or t
  misc_feature (1122)..(1122): n is a, c, g, or t
  misc_feature (1139)..(1139): n is a, c, g, or t
  misc_feature (1145)..(1145): n is a, c, g, or t
  misc_feature (1156)..(1156): n is a, c, g, or t
  misc_feature (1158)..(1158): n is a, c, g, or t
  misc_feature (1160)..(1160): n is a, c, g, or t
  misc_feature (1172)..(1172): n is a, c, g, or t
  misc_feature (1191)..(1191): n is a, c, g, or t
  misc_feature (1193)..(1193): n is a, c, g, or t
  misc_feature (1196)..(1196): n is a, c, g, or t
  misc_feature (1200)..(1200): n is a, c, g, or t
  misc_feature (1203)..(1204): n is a, c, g, or t
  misc_feature (1210)..(1210): n is a, c, g, or t
  misc_feature (1217)..(1217): n is a, c, g, or t
  misc_feature (1220)..(1220): n is a, c, g, or t
  misc_feature (1224)..(1224): n is a, c, g, or t
  misc_feature (1230)..(1230): n is a, c, g, or t
  misc_feature (1233)..(1233): n is a, c, g, or t
  misc_feature (1241)..(1241): n is a, c, g, or t
  misc_feature (1249)..(1249): n is a, c, g, or t
  misc_feature (1254)..(1254): n is a, c, g, or t
  misc_feature (1257)..(1257): n is a, c, g, or t
  misc_feature (1262)..(1262): n is a, c, g, or t
  misc_feature (1273)..(1273): n is a, c, g, or t
  misc_feature (1277)..(1277): n is a, c, g, or t
  misc_feature (1282)..(1282): n is a, c, g, or t
  misc_feature (1286)..(1286): n is a, c, g, or t
tagagagattactatgagaggatcgcatcaccatcaccatcacggatcctatttaggtgacactatagaatcgtcgacccacgcgtccggcaccaccaactgcttagcacccctggccaaggtcatccatgacaactttggtatcgtggaaggactcatgaccacagtccatgccatcactgccacccagaagactgtggatggcccctccgggaaactgtggcgtgatggccgcggggctctccagaacatcatccctgcctctactggcgctgccaaggctgtgggcaaggtcatccctgagctgaacgggaagctcactggcatggccttccgtgtccccactgccaacgtgtcagtggtggacctgacctgccgtctagaaaaacctgccaaatatgatgacatcaagaaggtggtgaagcaggcgtcggagggccccctcaagggcatcctgggctacactgagcaccaggtggtctcctctgacttcaacagcgacacccactcctccaccttcgacgctggggctggcattgccctcaacgaccactttgtcaagctcatttcctggtatgacaacgaatttggctacagcaacagggtggtggacctcatggcccacatggcctccaaggagtaagacccctggaccaccagccccagcaagagcacaagaggaagagagagaccctcactgctggggagtccctgccacactcagtcccccaccacactgaatctcccctcctcacagtttccatgtagaccccttgaagaggggaggggcctagggagccgcaccttgtcatgtaccatcaataaagtaccctgtgctcaaccnnnnnnnnnnnnnnnnananannaaaanggcggccgctccctatagtgagtcgtattaagcttaattanctgancttggactcctgttgananatccagtaatgacctcaaactccatctggattttttaaaacgctcggttgcccccgggngtttttttttggggaaaatccaagctagcttggcgaaatttnnngaactangaanctaaatggaaaaaaaatcctggaataccccgtnanantccaatggctcnaaaaaatttnaggctttcancantgctcatgaccttaacnaacgtncctggaaatangncnttttaaaaccgnaaaaaaaaaaaccaatttnancgncttnttnnattttngcccccnganaagncccccnganttttttgnaaaaaaanggacnggnaaagnaaagtttcccntttnacccntttn

SEQ ID NO: 163 - DNA, 1200 bp, Homo Sapiens
  misc_feature (760)..(760): n is a, c, g, or t
  misc_feature (825)..(825): n is a, c, g, or t
  misc_feature (892)..(892): n is a, c, g, or t
  misc_feature (906)..(906): n is a, c, g, or t
  misc_feature (950)..(950): n is a, c, g, or t
  misc_feature (963)..(963): n is a, c, g, or t
  misc_feature (975)..(975): n is a, c, g, or t
  misc_feature (977)..(977): n is a, c, g, or t
  misc_feature (979)..(979): n is a, c, g, or t
  misc_feature (983)..(984): n is a, c, g, or t
  misc_feature (1004)..(1004): n is a, c, g, or t
  misc_feature (1024)..(1024): n is a, c, g, or t
  misc_feature (1039)..(1039): n is a, c, g, or t
  misc_feature (1043)..(1043): n is a, c, g, or t
  misc_feature (1062)..(1062): n is a, c, g, or t
  misc_feature (1067)..(1067): n is a, c, g, or t
  misc_feature (1073)..(1073): n is a, c, g, or t
  misc_feature (1088)..(1088): n is a, c, g, or t
  misc_feature (1091)..(1091): n is a, c, g, or t
  misc_feature (1094)..(1094): n is a, c, g, or t
  misc_feature (1098)..(1102): n is a, c, g, or t
  misc_feature (1104)..(1104): n is a, c, g, or t
  misc_feature (1106)..(1114): n is a, c, g, or t
  misc_feature (1116)..(1116): n is a, c, g, or t
  misc_feature (1119)..(1125): n is a, c, g, or t
  misc_feature (1128)..(1129): n is a, c, g, or t
  misc_feature (1131)..(1137): n is a, c, g, or t
  misc_feature (1139)..(1141): n is a, c, g, or t
  misc_feature (1143)..(1143): n is a, c, g, or t
  misc_feature (1146)..(1147): n is a, c, g, or t
  misc_feature (1149)..(1154): n is a, c, g, or t
  misc_feature (1161)..(1162): n is a, c, g, or t
  misc_feature (1171)..(1171): n is a, c, g, or t
  misc_feature (1186)..(1186): n is a, c, g, or t
  misc_feature (1195)..(1196): n is a, c, g, or t
aatagagaaattactatgagaggatcgcatcaccatcaccatcacggatcctatttaggtgacactatagaatcgtcgacccacgcgtccggacagaaaaatggtttcctaggctgctgctattctgtgcagtgtcagaacatgttcgcctgtgtcccagtgacttcagcttcagctgtggctgaaagaggccaaggcacagctcagacccttgcttctaagggtgtaaaccctaagccttgcagtttcccacatggtgtttggcctgttggtgcatagaagtcaaaaatcgaggtttgagaacctccacctagatttcggaggatgtatggaaatgcctggatatccaggcagaattttgctggagaggcagagccctaacagagaacctctgctaaggcagtgcagaagggaaatgttgggtcagaactcccacacagagtccccactggggcactgcctagtggagcagtgagaagagggccaccatcctccagaccccagaatggtagatccaccaacagcttgcactatgcatctggaaaagctgcagacagtcaacaccatcctatgaaagcagtggaaagtggggctatatcttgcaaagccacagaggcggggctgcccaaggccatgggtgcccatctcttgcatcagcatgacctggatgtgtgacatgaagtcaagggagatcattttggagctttaagatctggctgccctgctgaattttggacttgcatgaggcctgtagccctgnttgttttggccaatttctcccaattggaatgggtatattttttctattgcctgtaccccccattngtatctaggaaagtaactaacttgctttttgattttacagtctcgtaggtagaaagaaactgctttntctcaaatgagacntttggactgtgggactttttgagttaacccttgaaaataaggcntttgggagactgntaaaaaaaggcntnanctgnnggtttgaaattgtgaggacnttgaaaatttgggaagtggntggaatggaaacatngaanctaacctttttaaaaaatnggaantcctancaaaaaaaaaaaaanaanaanaaannnnntntnnnnnnnnnantcnnnnnnnaanntnnnnnnnannnanttnnannnnnntgggggnngccccccanaaggggccaaaaaancttattacnnaact

SEQ ID NO: 164 - DNA, 1389 bp, Homo Sapiens
  misc_feature (641)..(641): n is a, c, g, or t
  misc_feature (874)..(874): n is a, c, g, or t
  misc_feature (885)..(885): n is a, c, g, or t
  misc_feature (908)..(908): n is a, c, g, or t
  misc_feature (918)..(918): n is a, c, g, or t
  misc_feature (923)..(923): n is a, c, g, or t
  misc_feature (927)..(927): n is a, c, g, or t
  misc_feature (944)..(944): n is a, c, g, or t
  misc_feature (947)..(947): n is a, c, g, or t
  misc_feature (957)..(957): n is a, c, g, or t
  misc_feature (969)..(969): n is a, c, g, or t
  misc_feature (974)..(974): n is a, c, g, or t
  misc_feature (976)..(976): n is a, c, g, or t
  misc_feature (984)..(984): n is a, c, g, or t
  misc_feature (989)..(989): n is a, c, g, or t
  misc_feature (999)..(999): n is a, c, g, or t
  misc_feature (1002)..(1002): n is a, c, g, or t
  misc_feature (1007)..(1007): n is a, c, g, or t
  misc_feature (1014)..(1014): n is a, c, g, or t
  misc_feature (1022)..(1022): n is a, c, g, or t
  misc_feature (1029)..(1029): n is a, c, g, or t
  misc_feature (1035)..(1035): n is a, c, g, or t
  misc_feature (1038)..(1038): n is a, c, g, or t
  misc_feature (1043)..(1043): n is a, c, g, or t
  misc_feature (1045)..(1046): n is a, c, g, or t
  misc_feature (1052)..(1052): n is a, c, g, or t
  misc_feature (1055)..(1055): n is a, c, g, or t
  misc_feature (1064)..(1064): n is a, c, g, or t
  misc_feature (1066)..(1066): n is a, c, g, or t
  misc_feature (1070)..(1070): n is a, c, g, or t
  misc_feature (1073)..(1073): n is a, c, g, or t
  misc_feature (1081)..(1081): n is a, c, g, or t
  misc_feature (1083)..(1083): n is a, c, g, or t
  misc_feature (1086)..(1086): n is a, c, g, or t
  misc_feature (1093)..(1093): n is a, c, g, or t
  misc_feature (1099)..(1099): n is a, c, g, or t
  misc_feature (1105)..(1105): n is a, c, g, or t
  misc_feature (1108)..(1108): n is a, c, g, or t
  misc_feature (1114)..(1114): n is a, c, g, or t
  misc_feature (1118)..(1119): n is a, c, g, or t
  misc_feature (1127)..(1127): n is a, c, g, or t
  misc_feature (1132)..(1132): n is a, c, g, or t
  misc_feature (1134)..(1134): n is a, c, g, or t
  misc_feature (1136)..(1136): n is a, c, g, or t
  misc_feature (1147)..(1147): n is a, c, g, or t
  misc_feature (1155)..(1156): n is a, c, g, or t
  misc_feature (1158)..(1158): n is a, c, g, or t
  misc_feature (1162)..(1163): n is a, c, g, or t
  misc_feature (1167)..(1167): n is a, c, g, or t
  misc_feature (1170)..(1170): n is a, c, g, or t
  misc_feature (1177)..(1177): n is a, c, g, or t
  misc_feature (1180)..(1183): n is a, c, g, or t
  misc_feature (1185)..(1185): n is a, c, g, or t
  misc_feature (1187)..(1187): n is a, c, g, or t
  misc_feature (1195)..(1196): n is a, c, g, or t
  misc_feature (1203)..(1203): n is a, c, g, or t
  misc_feature (1211)..(1211): n is a, c, g, or t
  misc_feature (1216)..(1216): n is a, c, g, or t
  misc_feature (1219)..(1220): n is a, c, g, or t
  misc_feature (1223)..(1233): n is a, c, g, or t
  misc_feature (1238)..(1239): n is a, c, g, or t
  misc_feature (1244)..(1244): n is a, c, g, or t
  misc_feature (1247)..(1250): n is a, c, g, or t
  misc_feature (1252)..(1252): n is a, c, g, or t
  misc_feature (1254)..(1256): n is a, c, g, or t
  misc_feature (1258)..(1258): n is a, c, g, or t
  misc_feature (1260)..(1260): n is a, c, g, or t
  misc_feature (1263)..(1266): n is a, c, g, or t
  misc_feature (1270)..(1272): n is a, c, g, or t
  misc_feature (1276)..(1276): n is a, c, g, or t
  misc_feature (1285)..(1285): n is a, c, g, or t
  misc_feature (1290)..(1290): n is a, c, g, or t
  misc_feature (1292)..(1292): n is a, c, g, or t
  misc_feature (1295)..(1295): n is a, c, g, or t
  misc_feature (1302)..(1302): n is a, c, g, or t
  misc_feature (1304)..(1304): n is a, c, g, or t
  misc_feature (1307)..(1314): n is a, c, g, or t
  misc_feature (1316)..(1317): n is a, c, g, or t
  misc_feature (1321)..(1322): n is a, c, g, or t
  misc_feature (1328)..(1328): n is a, c, g, or t
  misc_feature (1332)..(1340): n is a, c, g, or t
  misc_feature (1345)..(1346): n is a, c, g, or t
  misc_feature (1353)..(1355): n is a, c, g, or t
  misc_feature (1360)..(1364): n is a, c, g, or t
  misc_feature (1366)..(1366): n is a, c, g, or t
  misc_feature (1369)..(1372): n is a, c, g, or t
  misc_feature (1375)..(1376): n is a, c, g, or t
  misc_feature (1378)..(1378): n is a, c, g, or t
  misc_feature (1381)..(1386): n is a, c, g, or t
  misc_feature (1389)..(1389): n is a, c, g, or t
tagagaaattaactatgagaggatcgcatcaccatcaccatcacggatcctatttaggtgacactatagaatcgtcgacccacgcgtccgggctcggggcgccgaggcttccgcgcccgctggttcctcgctccggggcggagctcgcgatagcgaccgggagcagggcgcggggcgggacccaggtccgaggcgaggaagccggaagccaggcgcggggagcctcccccttcgactgcagcctcgctccgtgccttctgcgcgcctgggatcccggagcctgcctaggttctgtgcgctcccgcccaggccggtgcccgccgcccgcctgcgccccaggcaggtcccaggcctccggctgctcccggccgaaggtggggacaggcagtggcaggcaccactagcgagggcgtttgggaacccagggtgaccacggcgcagccatggggaccgcgcttgtgtaccatgaggacatgacggccacccggctgctctgggacgagtaagtgggacctggccgaggtggggtgcggggagggacctctgaactgagctcctcatctgccccagccccgagtgcgagatcgagcgtcctgagcgcctgaccgcagccctggatcgcctgcggcagcgcggcctgnaacagaggtgtctgcggttgtcagcccgcgaggcctcggaagaggagctgggcctggtgcacagagtacctttcactgcgcgcggctggccgcaggggctggactgcagctggtggacgctgtgctcactggagctgtgcaaaatgggcttgccctggtgaggcctcccgggcaccatggccagaaggcggctgccaacgggttctgcgtgttcaacaacgtggccataacanctgcacatgcnaacaaaaacacgggctaaacagnatcctcgtcntgaantggnatgtgcaccatggccanggnatccaatatntcttttaagatnacccnancgtctttnatttntcttggaacnctnttaanatgggcnctttggcntttctgnaaaatnaancaaancnntggggnggnaaaggcctngntttnttntaaactgncntgnaaacaanttgganggaaanctnaataanggtnnctttctgnactgntntnccatggctttnaaatttanncncccnncggnacnttaaggnaannnngncncccaaaannttttccncttaaaanttttnaannttnnnnnnnnnnnttttnnttttnaannnntncnnntnanttnnnnaaannntttnaaaaaaaantttgngnacnccccccntnggnnnnnnnntnnaaannaaaaanaaannnnnnnnnccccnnaaaaacnnnaaaannnnntnaannnnccnnanaannnnnnttn

SEQ ID NO: 165 - DNA, 1392 bp, Homo Sapiens
  misc_feature (826)..(826): n is a, c, g, or t
  misc_feature (852)..(852): n is a, c, g, or t
  misc_feature (854)..(854): n is a, c, g, or t
  misc_feature (877)..(877): n is a, c, g, or t
  misc_feature (880)..(880): n is a, c, g, or t
  misc_feature (901)..(901): n is a, c, g, or t
  misc_feature (948)..(948): n is a, c, g, or t
  misc_feature (974)..(974): n is a, c, g, or t
  misc_feature (986)..(986): n is a, c, g, or t
  misc_feature (997)..(997): n is a, c, g, or t
  misc_feature (1007)..(1007): n is a, c, g, or t
  misc_feature (1011)..(1011): n is a, c, g, or t
  misc_feature (1013)..(1013): n is a, c, g, or t
  misc_feature (1020)..(1020): n is a, c, g, or t
  misc_feature (1023)..(1023): n is a, c, g, or t
  misc_feature (1031)..(1031): n is a, c, g, or t
  misc_feature (1054)..(1054): n is a, c, g, or t
  misc_feature (1056)..(1056): n is a, c, g, or t
  misc_feature (1062)..(1062): n is a, c, g, or t
  misc_feature (1064)..(1065): n is a, c, g, or t
  misc_feature (1080)..(1081): n is a, c, g, or t
  misc_feature (1089)..(1089): n is a, c, g, or t
  misc_feature (1093)..(1093): n is a, c, g, or t
  misc_feature (1098)..(1099): n is a, c, g, or t
  misc_feature (1112)..(1113): n is a, c, g, or t
  misc_feature (1129)..(1129): n is a, c, g, or t
  misc_feature (1137)..(1137): n is a, c, g, or t
  misc_feature (1139)..(1139): n is a, c, g, or t
  misc_feature (1147)..(1147): n is a, c, g, or t
  misc_feature (1151)..(1151): n is a, c, g, or t
  misc_feature (1154)..(1154): n is a, c, g, or t
  misc_feature (1156)..(1156): n is a, c, g, or t
  misc_feature (1165)..(1165): n is a, c, g, or t
  misc_feature (1171)..(1171): n is a, c, g, or t
  misc_feature (1190)..(1190): n is a, c, g, or t
  misc_feature (1199)..(1199): n is a, c, g, or t
  misc_feature (1204)..(1205): n is a, c, g, or t
  misc_feature (1212)..(1213): n is a, c, g, or t
  misc_feature (1222)..(1222): n is a, c, g, or t
  misc_feature (1240)..(1241): n is a, c, g, or t
  misc_feature (1248)..(1248): n is a, c, g, or t
  misc_feature (1256)..(1256): n is a, c, g, or t
  misc_feature (1259)..(1259): n is a, c, g, or t
  misc_feature (1272)..(1273): n is a, c, g, or t
  misc_feature (1280)..(1280): n is a, c, g, or t
  misc_feature (1282)..(1283): n is a, c, g, or t
  misc_feature (1289)..(1291): n is a, c, g, or t
  misc_feature (1294)..(1295): n is a, c, g, or t
  misc_feature (1297)..(1300): n is a, c, g, or t
  misc_feature (1304)..(1316): n is a, c, g, or t
  misc_feature (1318)..(1322): n is a, c, g, or t
  misc_feature (1325)..(1325): n is a, c, g, or t
  misc_feature (1329)..(1331): n is a, c, g, or t
  misc_feature (1333)..(1337): n is a, c, g, or t
  misc_feature (1342)..(1342): n is a, c, g, or t
  misc_feature (1346)..(1348): n is a, c, g, or t
  misc_feature (1356)..(1358): n is a, c, g, or t
  misc_feature (1363)..(1364): n is a, c, g, or t
  misc_feature (1373)..(1373): n is a, c, g, or t
  misc_feature (1380)..(1381): n is a, c, g, or t
  misc_feature (1383)..(1383): n is a, c, g, or t
  misc_feature (1385)..(1386): n is a, c, g, or t
  misc_feature (1392)..(1392): n is a, c, g, or t
tagagaaattactatgagaggatcgcatcaccatcaccatcacggatcctatttaggtgacactatagaatcgtcgacccacgcgtccgcttcagcagcaagagcagcagctccagcaactccagcagctcctggcctccccgcagctgaccccggaacaccagactgttgtctaccagatgatccagcagatccagcagaaacgggagctgcagcgcctgcagatggctgggggctcccagctgcccatggccagcctgctggcaggaagctccaccccgctgctgtctgcgggtacccctggcctgctgcccacagcgtctgctccacccctgctgcccgctggagccctagtggctccctcgcttggcaacaacacaagtctcatggccgcagcagctgcagctgcagcagtagcagcagcaggcggacctccagtcctcactgcccagaccaaccccttcctcagcctgtcgggagcagagggcagtggcggtggccccaaaggagggaccgctgacaaaggagcctcagccaaccaggaaaaaggctaaatccacccttacccctcctgacccccccaagtggagggaacagatcctggcctgaggggtcctagcctggagcaggcgcctgcgcccagaccctggagagccttgacccagagcctgtgctgaggtccagggagtgtggagagctcctggtgtcgaggactgagactgagaggggagccccctccatctggcccccttccctttccgcactgtccgctttgtgaggctcagaggaaggacagtctgcaagcccgcctaggaggtccatcccnagcaaatgttttggaggtccccccananagcaaagtgggccatggcaaaantanggggttggttggacctgtcanatgaaaatggatcagcactttgaatgggaaaaattggaaggaaaagnccttggcctgtccctgcggggaaatnttttatggaaanaagggctggancccactttanctgnanttttttnccnacttgggnaaaatggaaaaaggaacccttgnantttttntnncatcccccccccagnnaaggggcnaaanttgannttttaaaaacccnnaaattttgggggctgnaaaagggnangaaaaaantaanttnancccagcctnttaaanttttgggccccttaaaggnaaaaaaggnaaggnngggaaanntttgccttntttgggcccccctttttnncaattgnaaataaangcnaaaggggaaaaannccccccnanntaaggnnngcnnannnngtgnnnnnnnnnnnnntnnnnnttncccnnnannnnnagggnaaannnttaaaaannnaaaannccctttttncccccanntntnngggggn

SEQ ID NO: 166 - DNA, 1334 bp, Homo Sapiens
  misc_feature (879)..(879): n is a, c, g, or t
  misc_feature (882)..(882): n is a, c, g, or t
  misc_feature (896)..(896): n is a, c, g, or t
  misc_feature (957)..(957): n is a, c, g, or t
  misc_feature (974)..(974): n is a, c, g, or t
  misc_feature (1018)..(1018): n is a, c, g, or t
  misc_feature (1034)..(1034): n is a, c, g, or t
  misc_feature (1040)..(1040): n is a, c, g, or t
  misc_feature (1062)..(1062): n is a, c, g, or t
  misc_feature (1088)..(1088): n is a, c, g, or t
  misc_feature (1096)..(1096): n is a, c, g, or t
  misc_feature (1104)..(1104): n is a, c, g, or t
  misc_feature (1106)..(1106): n is a, c, g, or t
  misc_feature (1126)..(1127): n is a, c, g, or t
  misc_feature (1130)..(1130): n is a, c, g, or t
  misc_feature (1132)..(1134): n is a, c, g, or t
  misc_feature (1166)..(1166): n is a, c, g, or t
  misc_feature (1169)..(1169): n is a, c, g, or t
  misc_feature (1174)..(1174): n is a, c, g, or t
  misc_feature (1177)..(1177): n is a, c, g, or t
  misc_feature (1179)..(1179): n is a, c, g, or t
  misc_feature (1181)..(1181): n is a, c, g, or t
  misc_feature (1185)..(1185): n is a, c, g, or t
  misc_feature (1188)..(1188): n is a, c, g, or t
  misc_feature (1191)..(1191): n is a, c, g, or t
  misc_feature (1197)..(1197): n is a, c, g, or t
  misc_feature (1201)..(1202): n is a, c, g, or t
  misc_feature (1204)..(1204): n is a, c, g, or t
  misc_feature (1206)..(1206): n is a, c, g, or t
  misc_feature (1208)..(1208): n is a, c, g, or t
  misc_feature (1212)..(1215): n is a, c, g, or t
  misc_feature (1230)..(1230): n is a, c, g, or t
  misc_feature (1233)..(1234): n is a, c, g, or t
  misc_feature (1239)..(1239): n is a, c, g, or t
  misc_feature (1245)..(1245): n is a, c, g, or t
  misc_feature (1250)..(1250): n is a, c, g, or t
  misc_feature (1258)..(1258): n is a, c, g, or t
  misc_feature (1264)..(1264): n is a, c, g, or t
  misc_feature (1277)..(1277): n is a, c, g, or t
  misc_feature (1282)..(1282): n is a, c, g, or t
  misc_feature (1285)..(1288): n is a, c, g, or t
  misc_feature (1293)..(1293): n is a, c, g, or t
  misc_feature (1296)..(1296): n is a, c, g, or t
  misc_feature (1298)..(1298): n is a, c, g, or t
  misc_feature (1309)..(1309): n is a, c, g, or t
  misc_feature (1312)..(1312): n is a, c, g, or t
  misc_feature (1320)..(1322): n is a, c, g, or t
  misc_feature (1327)..(1327): n is a, c, g, or t
  misc_feature (1329)..(1330): n is a, c, g, or t
  misc_feature (1332)..(1334): n is a, c, g, or t
gagaaattactatgagaggatcgcatcaccatcaccatcacggatcctatttaggtgacactatagaatcgtcgacccacgcgtccgccatggctgagctgcagcagctccgggtgcaggaggcggtggagtccatggtgaagagtctggaaagagagaacatccggaagatgcagggtctcatgttccggtgcagcgccagctgttgtgaggacagccaggcctccatgaagcaggtgcaccagtgcatcgagcgctgccatgtgcctctggctcaagcccaggctttggtcaccagtgagctggagaagttccaggaccgcctggcccggtgcaccatgcattgcaatgacaaagccaaagattcaatagatgctgggagtaaggagcttcaggtgaagcagcagctggacagttgtgtgaccaagtgtgtggatgaccacatgcacctcatcccaactatgaccaagaagatgaaggaggctctcttatcaattggaaaataaaagtatttgccagtggccatcagggctgagggcaagaatatattttttataaggaattgggaattttagtcttttaagcaaagtttacgaatgaagaaatgaaggatggccacaagcgtaaggcatatgtcacttgcctctggacactggttattttatgtttcagtccctaaaaaatgaaatggaaaaaagtggtgctaaatcgagtcagagatattacaggagagttttagagcttattatttcctgtggccagtgcttgtcctggcagtaaggctctcccctgtaacaagccagagccctccaaggtaccagactcttcttactacacaggtactaacaggctggcaggttaaagttggtggagtctganganagatatttttctcntttgttgccaacatcctgtttaccaaaagtgtcaccccaccatcttccataagctgtgaancaaaatcaatgaggtcnctaacttaaaagggaaaaaaagttttctgggtctttgttttctngatttgggggtaattnatacanggcatacaagttgattttaaangtggaactggggaggtaaactaattngaaaaaanctttgaangntccttgggaatccccatttnnggncnnnaaaaggggaaggacattttttaaaaatataanagngggcnccntncncccnggnaantgggcnaaanntngnangggnnnnaccccttttttgggnaannaaatnttgggngaggnccccgagngggggnaaaaaaaaaaagnaaaanttnnnnaaacnttncnttttaaaaaanggntttttttnnnaaaanannannn

SEQ ID NO: 167 - DNA, 1387 bp, Homo Sapiens
  misc_feature (7)..(7): n is a, c, g, or t
  misc_feature (856)..(856): n is a, c, g, or t
  misc_feature (859)..(859): n is a, c, g, or t
  misc_feature (880)..(880): n is a, c, g, or t
  misc_feature (916)..(916): n is a, c, g, or t
  misc_feature (940)..(940): n is a, c, g, or t
  misc_feature (961)..(961): n is a, c, g, or t
  misc_feature (968)..(968): n is a, c, g, or t
  misc_feature (976)..(976): n is a, c, g, or t
  misc_feature (998)..(998): n is a, c, g, or t
  misc_feature (1022)..(1023): n is a, c, g, or t
  misc_feature (1025)..(1025): n is a, c, g, or t
  misc_feature (1042)..(1042): n is a, c, g, or t
  misc_feature (1096)..(1096): n is a, c, g, or t
  misc_feature (1101)..(1101): n is a, c, g, or t
  misc_feature (1105)..(1105): n is a, c, g, or t
  misc_feature (1113)..(1113): n is a, c, g, or t
  misc_feature (1123)..(1123): n is a, c, g, or t
  misc_feature (1129)..(1129): n is a, c, g, or t
  misc_feature (1135)..(1135): n is a, c, g, or t
  misc_feature (1137)..(1137): n is a, c, g, or t
  misc_feature (1141)..(1141): n is a, c, g, or t
  misc_feature (1153)..(1153): n is a, c, g, or t
  misc_feature (1156)..(1156): n is a, c, g, or t
  misc_feature (1171)..(1172): n is a, c, g, or t
  misc_feature (1176)..(1176): n is a, c, g, or t
  misc_feature (1180)..(1180): n is a, c, g, or t
  misc_feature (1188)..(1188): n is a, c, g, or t
  misc_feature (1190)..(1190): n is a, c, g, or t
  misc_feature (1195)..(1195): n is a, c, g, or t
  misc_feature (1199)..(1199): n is a, c, g, or t
  misc_feature (1202)..(1202): n is a, c, g, or t
  misc_feature (1209)..(1209): n is a, c, g, or t
  misc_feature (1215)..(1215): n is a, c, g, or t
  misc_feature (1219)..(1219): n is a, c, g, or t
  misc_feature (1221)..(1222): n is a, c, g, or t
  misc_feature (1228)..(1228): n is a, c, g, or t
  misc_feature (1230)..(1231): n is a, c, g, or t
  misc_feature (1236)..(1237): n is a, c, g, or t
  misc_feature (1239)..(1239): n is a, c, g, or t
  misc_feature (1246)..(1246): n is a, c, g, or t
  misc_feature (1250)..(1251): n is a, c, g, or t
  misc_feature (1268)..(1268): n is a, c, g, or t
  misc_feature (1272)..(1273): n is a, c, g, or t
  misc_feature (1285)..(1285): n is a, c, g, or t
  misc_feature (1288)..(1289): n is a, c, g, or t
  misc_feature (1291)..(1292): n is a, c, g, or t
  misc_feature (1294)..(1299): n is a, c, g, or t
  misc_feature (1301)..(1301): n is a, c, g, or t
  misc_feature (1303)..(1303): n is a, c, g, or t
  misc_feature (1308)..(1308): n is a, c, g, or t
  misc_feature (1324)..(1324): n is a, c, g, or t
  misc_feature (1329)..(1332): n is a, c, g, or t
  misc_feature (1337)..(1337): n is a, c, g, or t
  misc_feature (1340)..(1340): n is a, c, g, or t
  misc_feature (1344)..(1345): n is a, c, g, or t
  misc_feature (1350)..(1350): n is a, c, g, or t
  misc_feature (1353)..(1353): n is a, c, g, or t
  misc_feature (1360)..(1360): n is a, c, g, or t
  misc_feature (1366)..(1367): n is a, c, g, or t
  misc_feature (1369)..(1369): n is a, c, g, or t
  misc_feature (1371)..(1371): n is a, c, g, or t
atagagnaattactatgagaggatcgcatcaccatcaccatcacggatcctatttaggtgacactatagaatcgtcgacccacgcgtccgcggacgcgtgggctgcggggatgtatttggaacattatctggacaacctgaaggctgaaattgacaagttggccactgagtatatgagtagtgcccgcagcctgagctccgaggaaaaattggcccttctcaaacagatccaggaagcctatggcaagtgcaaggaatttggtgacgacaaggtgcagcttgccatgcagacctatgagatggtggacaaacacattcggcggctggacacagacctggcccgttttgaggctgatctcaaggagaaacagattgagtcaagtgactatgacagctcttccagcaaaggcaaaaagagccggactcaaaaggagaagaaagctgctcgtgctcgttccaaagggaaaaactcggatgaagaagcccccaagactgcccagaagaagttaaagctcgtgcgcacgtctcctatggagagatgattggctgtgacaaccctgattgttccattgagtggttccattttgcctgtgtggggctgacaaccaagcctcgggggaaatggttttgcccacgctgctcccaagaacggaagaagaaatagataagggccttggattccaacacagtttcttccacatcccctgacttgggctagtgggcagaggaatgcctgtgctggggccaggggttcagggaggagtggatggcacagtgctgtcatcccttctcctccccctctccccactcccggtgctgaggctgcatcaaaccctggtagggaggggtgccgcanccnctaacggtatgtgctctcctncagccctctcccttcggagggacgtggtcttgcccnctgtccttttgcctccatgctgangtcgggggctgtatttcaaanggagggnccttttcnttccccttgctttggaattaangactgggggcataacatgggggcnntncccccaaacctctttcnttcccccctcctggggggagggctagggggggataaaaacttttcttccccatnccctnccgnttttttcngggggggggncccccngtcttnanggcnttggccctaatnaanggcccccccttcctnntccnaaanatttcccntngaaangggncangggaatncaaaantccntnnaaaggnanntgggnngnaaaaaancttnnttttaaaaaaaaaaaangggnncccccccagggncannanntnnnnnnantngcccngtgaaaccaaaccccnacccnnnnttttnaancccnngcccnggnttttttnggaaanncntnggaatttaaaaaaaaa

SEQ ID NO: 168 - DNA, 1497 bp, Homo Sapiens
  misc_feature (36)..(36): n is a, c, g, or t
  misc_feature (43)..(43): n is a, c, g, or t
  misc_feature (63)..(63): n is a, c, g, or t
  misc_feature (75)..(75): n is a, c, g, or t
  misc_feature (137)..(137): n is a, c, g, or t
  misc_feature (273)..(273): n is a, c, g, or t
  misc_feature (375)..(375): n is a, c, g, or t
  misc_feature (397)..(397): n is a, c, g, or t
  misc_feature (433)..(433): n is a, c, g, or t
  misc_feature (536)..(536): n is a, c, g, or t
  misc_feature (545)..(545): n is a, c, g, or t
  misc_feature (550)..(550): n is a, c, g, or t
  misc_feature (563)..(563): n is a, c, g, or t
  misc_feature (568)..(568): n is a, c, g, or t
  misc_feature (583)..(584): n is a, c, g, or t
  misc_feature (593)..(593): n is a, c, g, or t
  misc_feature (600)..(600): n is a, c, g, or t
  misc_feature (635)..(635): n is a, c, g, or t
  misc_feature (644)..(644): n is a, c, g, or t
  misc_feature (651)..(651): n is a, c, g, or t
  misc_feature (654)..(654): n is a, c, g, or t
  misc_feature (656)..(656): n is a, c, g, or t
  misc_feature (660)..(661): n is a, c, g, or t
  misc_feature (665)..(666): n is a, c, g, or t
  misc_feature (670)..(670): n is a, c, g, or t
  misc_feature (673)..(673): n is a, c, g, or t
  misc_feature (683)..(683): n is a, c, g, or t
  misc_feature (688)..(689): n is a, c, g, or t
  misc_feature (701)..(701): n is a, c, g, or t
  misc_feature (706)..(706): n is a, c, g, or t
  misc_feature (712)..(713): n is a, c, g, or t
  misc_feature (725)..(725): n is a, c, g, or t
  misc_feature (733)..(735): n is a, c, g, or t
  misc_feature (740)..(740): n is a, c, g, or t
  misc_feature (742)..(742): n is a, c, g, or t
  misc_feature (756)..(756): n is a, c, g, or t
  misc_feature (763)..(763): n is a, c, g, or t
  misc_feature (778)..(778): n is a, c, g, or t
  misc_feature (780)..(780): n is a, c, g, or t
  misc_feature (782)..(782): n is a, c, g, or t
  misc_feature (788)..(788): n is a, c, g, or t
  misc_feature (792)..(792): n is a, c, g, or t
  misc_feature (794)..(794): n is a, c, g, or t
  misc_feature (797)..(797): n is a, c, g, or t
  misc_feature (806)..(806): n is a, c, g, or t
  misc_feature (811)..(812): n is a, c, g, or t
  misc_feature (824)..(824): n is a, c, g, or t
  misc_feature (827)..(829): n is a, c, g, or t
  misc_feature (836)..(836): n is a, c, g, or t
  misc_feature (844)..(845): n is a, c, g, or t
  misc_feature (849)..(849): n is a, c, g, or t
  misc_feature (853)..(853): n is a, c, g, or t
  misc_feature (856)..(856): n is a, c, g, or t
  misc_feature (863)..(863): n is a, c, g, or t
  misc_feature (903)..(903): n is a, c, g, or t
  misc_feature (907)..(907): n is a, c, g, or t
  misc_feature (910)..(913): n is a, c, g, or t
  misc_feature (915)..(915): n is a, c, g, or t
  misc_feature (923)..(923): n is a, c, g, or t
  misc_feature (928)..(929): n is a, c, g, or t
  misc_feature (935)..(935): n is a, c, g, or t
  misc_feature (940)..(940): n is a, c, g, or t
  misc_feature (943)..(943): n is a, c, g, or t
  misc_feature (946)..(946): n is a, c, g, or t
  misc_feature (949)..(949): n is a, c, g, or t
  misc_feature (964)..(964): n is a, c, g, or t
  misc_feature (971)..(972): n is a, c, g, or t
  misc_feature (979)..(979): n is a, c, g, or t
  misc_feature (982)..(982): n is a, c, g, or t
  misc_feature (991)..(991): n is a, c, g, or t
  misc_feature (998)..(998): n is a, c, g, or t
  misc_feature (1001)..(1002): n is a, c, g, or t
  misc_feature (1004)..(1004): n is a, c, g, or t
  misc_feature (1007)..(1007): n is a, c, g, or t
  misc_feature (1010)..(1010): n is a, c, g, or t
  misc_feature (1012)..(1013): n is a, c, g, or t
  misc_feature (1015)..(1015): n is a, c, g, or t
  misc_feature (1024)..(1025): n is a, c, g, or t
  misc_feature (1032)..(1032): n is a, c, g, or t
  misc_feature (1041)..(1041): n is a, c, g, or t
  misc_feature (1045)..(1046): n is a, c, g, or t
  misc_feature (1055)..(1055): n is a, c, g, or t
  misc_feature (1061)..(1061): n is a, c, g, or t
  misc_feature (1066)..(1066): n is a, c, g, or t
  misc_feature (1068)..(1068): n is a, c, g, or t
  misc_feature (1070)..(1070): n is a, c, g, or t
  misc_feature (1086)..(1086): n is a, c, g, or t
  misc_feature (1099)..(1099): n is a, c, g, or t
  misc_feature (1101)..(1101): n is a, c, g, or t
  misc_feature (1109)..(1109): n is a, c, g, or t
  misc_feature (1115)..(1115): n is a, c, g, or t
  misc_feature (1122)..(1122): n is a, c, g, or t
  misc_feature (1125)..(1125): n is a, c, g, or t
  misc_feature (1127)..(1127): n is a, c, g, or t
  misc_feature (1135)..(1135): n is a, c, g, or t
  misc_feature (1145)..(1146): n is a, c, g, or t
  misc_feature (1157)..(1157): n is a, c, g, or t
  misc_feature (1159)..(1161): n is a, c, g, or t
  misc_feature (1166)..(1166): n is a, c, g, or t
  misc_feature (1169)..(1169): n is a, c, g, or t
  misc_feature (1177)..(1178): n is a, c, g, or t
  misc_feature (1187)..(1187): n is a, c, g, or t
  misc_feature (1205)..(1205): n is a, c, g, or t
  misc_feature (1208)..(1209): n is a, c, g, or t
  misc_feature (1214)..(1214): n is a, c, g, or t
  misc_feature (1217)..(1218): n is a, c, g, or t
  misc_feature (1221)..(1221): n is a, c, g, or t
  misc_feature (1225)..(1225): n is a, c, g, or t
  misc_feature (1227)..(1228): n is a, c, g, or t
  misc_feature (1232)..(1232): n is a, c, g, or t
  misc_feature (1236)..(1236): n is a, c, g, or t
  misc_feature (1247)..(1248): n is a, c, g, or t
  misc_feature (1255)..(1255): n is a, c, g, or t
  misc_feature (1274)..(1274): n is a, c, g, or t
  misc_feature (1278)..(1278): n is a, c, g, or t
  misc_feature (1281)..(1281): n is a, c, g, or t
  misc_feature (1284)..(1285): n is a, c, g, or t
  misc_feature (1287)..(1287): n is a, c, g, or t
  misc_feature (1291)..(1291): n is a, c, g, or t
  misc_feature (1299)..(1299): n is a, c, g, or t
  misc_feature (1302)..(1302): n is a, c, g, or t
  misc_feature (1307)..(1307): n is a, c, g, or t
  misc_feature (1316)..(1316): n is a, c, g, or t
  misc_feature (1323)..(1323): n is a, c, g, or t
  misc_feature (1326)..(1326): n is a, c, g, or t
  misc_feature (1332)..(1332): n is a, c, g, or t
  misc_feature (1372)..(1372): n is a, c, g, or t
  misc_feature (1380)..(1381): n is a, c, g, or t
  misc_feature (1383)..(1385): n is a, c, g, or t
  misc_feature (1394)..(1394): n is a, c, g, or t
  misc_feature (1397)..(1397): n is a, c, g, or t
  misc_feature (1400)..(1401): n is a, c, g, or t
  misc_feature (1407)..(1407): n is a, c, g, or t
  misc_feature (1419)..(1419): n is a, c, g, or t
  misc_feature (1422)..(1422): n is a, c, g, or t
  misc_feature (1424)..(1424): n is a, c, g, or t
  misc_feature (1434)..(1434): n is a, c, g, or t
  misc_feature (1441)..(1441): n is a, c, g, or t
  misc_feature (1443)..(1443): n is a, c, g, or t
  misc_feature (1445)..(1445): n is a, c, g, or t
  misc_feature (1449)..(1449): n is a, c, g, or t
  misc_feature (1451)..(1451): n is a, c, g, or t
  misc_feature (1455)..(1455): n is a, c, g, or t
  misc_feature (1457)..(1457): n is a, c, g, or t
  misc_feature (1461)..(1461): n is a, c, g, or t
  misc_feature (1463)..(1463): n is a, c, g, or t
  misc_feature (1466)..(1466): n is a, c, g, or t
  misc_feature (1474)..(1476): n is a, c, g, or t
  misc_feature (1485)..(1485): n is a, c, g, or t
  misc_feature (1497)..(1497): n is a, c, g, or t
aaatagagaaattaattatgaagaggatcgcatcancattcancactcacggatcctatttangtgacactatanaatcgtcgacccacgcgtccggctggagcaggcgagcggcggcggccgatagcgagtgtcanggacggccggggccggggctgcggcgggccggccggggcggcgcttctcggcctgtcgctggtcggcctcctactgtacctcgtgcctgctgcggctgcgctggcctggctggccgtggggactaccgcggcctgntggggactgagcagcgagccccgaggttcgcgccccttgtcctccttcgttcagaaggcgcgacatcggcgaacactgttcgcttcgcctccggccaagtcnacagccaacggaaacctcctanagccgcggaccctgctcgaaggacctgaccctgccnaactgctcctcatgggcagttacctgggcaagcccgggccgccgcagcccgcccccgctccggagggccaggacctgcggaataggcctggccgccgcccgcncgcccggcnccgcnctccacaccgccntccanaccgccctccccgcnnacccatcgngttcacnacttttacccctctctccccaaatccacttctccnaccctccgngaggacnttncncaanntatnngtgngantttaaccaanatcgnnttgtaaataaanacctntaatanntttatctcgatnccatcaannnccaananattcctgttctggnagggtanttctcaaaattttgnangnaaatgnttantnaanataaaaggnttgtnnctgttcccctcncannntttccanaaaagatnngtanctanatngaattcnaaaaatttcccctccataacaaaaaaatttttcccttttntacnaannnnanaaattaanaattnntctttnaaaanttnttnttnaaaattcaaattaanttcaccnnaaaatcnaantgttaaaantaaaacnttnntnaantgncnntnaaacaaaannaaaaaanaaaatgatntctnnaaaaaaaantaaaanattantncnttgtaatataaaaaanattaatataaatntntcttgttnaaattntcattanaanantctttttntatttaaatnnctcaataatgnannnaaatncanttacattnntaaattgantatcttcatttattatanaannattanaanntanaaantnntttnaacnattaaaatttnncttatanaaaattaattcaaaaaatntatnttntcnntntttntacaaatntantatangtgattaanaatatanttntaatanctttaattttttacaataaatatttttccctacacttttntataaacnntnnntacattacntanttnntctatnctaataattctnttnancaataaaatnaagtaantngnattntntacntntaantnttntactgttnnnatgttattntaattataatan

SEQ ID NO: 169 - DNA, 1199 bp, Homo Sapiens
  misc_feature (898)..(898): n is a, c, g, or t
  misc_feature (928)..(928): n is a, c, g, or t
  misc_feature (948)..(948): n is a, c, g, or t
  misc_feature (951)..(951): n is a, c, g, or t
  misc_feature (963)..(963): n is a, c, g, or t
  misc_feature (978)..(979): n is a, c, g, or t
  misc_feature (981)..(981): n is a, c, g, or t
  misc_feature (983)..(983): n is a, c, g, or t
  misc_feature (1002)..(1002): n is a, c, g, or t
  misc_feature (1007)..(1007): n is a, c, g, or t
  misc_feature (1019)..(1019): n is a, c, g, or t
  misc_feature (1031)..(1031): n is a, c, g, or t
  misc_feature (1036)..(1036): n is a, c, g, or t
  misc_feature (1044)..(1044): n is a, c, g, or t
  misc_feature (1064)..(1064): n is a, c, g, or t
  misc_feature (1068)..(1068): n is a, c, g, or t
  misc_feature (1073)..(1073): n is a, c, g, or t
  misc_feature (1076)..(1076): n is a, c, g, or t
  misc_feature (1078)..(1079): n is a, c, g, or t
  misc_feature (1089)..(1089): n is a, c, g, or t
  misc_feature (1102)..(1103): n is a, c, g, or t
  misc_feature (1108)..(1108): n is a, c, g, or t
  misc_feature (1116)..(1116): n is a, c, g, or t
  misc_feature (1122)..(1122): n is a, c, g, or t
  misc_feature (1124)..(1125): n is a, c, g, or t
  misc_feature (1128)..(1128): n is a, c, g, or t
  misc_feature (1133)..(1133): n is a, c, g, or t
  misc_feature (1135)..(1135): n is a, c, g, or t
  misc_feature (1138)..(1138): n is a, c, g, or t
  misc_feature (1151)..(1151): n is a, c, g, or t
  misc_feature (1153)..(1153): n is a, c, g, or t
  misc_feature (1158)..(1158): n is a, c, g, or t
  misc_feature (1164)..(1164): n is a, c, g, or t
  misc_feature (1167)..(1167): n is a, c, g, or t
  misc_feature (1169)..(1169): n is a, c, g, or t
  misc_feature (1185)..(1185): n is a, c, g, or t
  misc_feature (1194)..(1194): n is a, c, g, or t
  misc_feature (1197)..(1197): n is a, c, g, or t
aatagagaaattaactatgagaggatcgcatcaccatcaccatcacggatcctatttaggtgacactatagaatcgtcgacccacgcgtccgcccacgcgtccgcgtcgccgccatcctcggcgcgactcgcttctttcggttctacctgggagaatccaccgccatccgccaccatggtgaacttcacggtagaccagatccgcgccatcatggacaagaaggccaacatccgcaacatgtctgtcatcgcccacgtggaccatggcaagtccacgctgacagactccctggtgtgcaaggcgggcatcatcgcctcggcccgggccggggagacacgcttcactgatacccggaaggacgagcaggagcgttgcatcaccatcaagtcaactgccatctccctcttctacgagctctcggagaatgacttgaacttcatcaagcagagcaaggacggtgccggcttcctcatcaacctcattgactcccccgggcatgtcgacttctcctcggaggtgactgctgccctccgagtcaccgatggcgcattggtggtggtggactgcgtgtcaggcgtgtgcgtgcagacggagacagtgctgcggcaggccattgccgagcgcatcaagcctgtgctgatgatgaacaagatggaccgcgccctgctggagctgcagctggagcccgaggagctctaccagactttccagcgcatcgtggagaacgtgaacgtcatcatctccacctacggcgagggcgagagcggccccatgggcaacatcatgatcgatcctgtcctcggtaccgtgggctttgggtctggcctccacgggtgggccttcaccctgaagcagtttgccgagatgtatgtggccaagttcgccgccaaggggganggccagttggggcctgccgagcgggccaanaagtaaaggacatgatgaanaanctgtggggtganaggtactttgaccanncnanggcaagttcagcaagtcanccacnacccccgaaggnaaaaactgccangcacntttggcantgatctggacccatcttcangggnttgangcntnntgaatttcanaaaaaggaaaagnnaactnataaaaantgggantnnaantggangnagnaaagaaaaaaggnancctgntaaagnttnangccccttgttcttgcnaaaaccttnttnaa

SEQ ID NO: 170 - DNA, 1421 bp, Homo Sapiens
  misc_feature (3)..(3): n is a, c, g, or t
  misc_feature (831)..(831): n is a, c, g, or t
  misc_feature (882)..(882): n is a, c, g, or t
  misc_feature (888)..(888): n is a, c, g, or t
  misc_feature (900)..(900): n is a, c, g, or t
  misc_feature (936)..(936): n is a, c, g, or t
  misc_feature (950)..(950): n is a, c, g, or t
  misc_feature (958)..(958): n is a, c, g, or t
  misc_feature (974)..(974): n is a, c, g, or t
  misc_feature (987)..(987): n is a, c, g, or t
  misc_feature (993)..(993): n is a, c, g, or t
  misc_feature (1002)..(1002): n is a, c, g, or t
  misc_feature (1005)..(1005): n is a, c, g, or t
  misc_feature (1010)..(1010): n is a, c, g, or t
  misc_feature (1022)..(1022): n is a, c, g, or t
  misc_feature (1030)..(1030): n is a, c, g, or t
  misc_feature (1032)..(1032): n is a, c, g, or t
  misc_feature (1040)..(1040): n is a, c, g, or t
  misc_feature (1049)..(1049): n is a, c, g, or t
  misc_feature (1062)..(1062): n is a, c, g, or t
  misc_feature (1064)..(1065): n is a, c, g, or t
  misc_feature (1081)..(1081): n is a, c, g, or t
  misc_feature (1088)..(1088): n is a, c, g, or t
  misc_feature (1114)..(1114): n is a, c, g, or t
  misc_feature (1117)..(1117): n is a, c, g, or t
  misc_feature (1124)..(1124): n is a, c, g, or t
  misc_feature (1134)..(1136): n is a, c, g, or t
  misc_feature (1144)..(1145): n is a, c, g, or t
  misc_feature (1151)..(1151): n is a, c, g, or t
  misc_feature (1153)..(1153): n is a, c, g, or t
  misc_feature (1155)..(1155): n is a, c, g, or t
  misc_feature (1157)..(1157): n is a, c, g, or t
  misc_feature (1159)..(1164): n is a, c, g, or t
  misc_feature (1170)..(1171): n is a, c, g, or t
  misc_feature (1173)..(1173): n is a, c, g, or t
  misc_feature (1183)..(1183): n is a, c, g, or t
  misc_feature (1195)..(1197): n is a, c, g, or t
  misc_feature (1203)..(1203): n is a, c, g, or t
  misc_feature (1211)..(1211): n is a, c, g, or t
  misc_feature (1217)..(1218): n is a, c, g, or t
  misc_feature (1222)..(1223): n is a, c, g, or t
  misc_feature (1228)..(1228): n is a, c, g, or t
  misc_feature (1237)..(1237): n is a, c, g, or t
  misc_feature (1240)..(1241): n is a, c, g, or t
  misc_feature (1245)..(1246): n is a, c, g, or t
  misc_feature (1255)..(1255): n is a, c, g, or t
  misc_feature (1265)..(1265): n is a, c, g, or t
  misc_feature (1271)..(1271): n is a, c, g, or t
  misc_feature (1276)..(1278): n is a, c, g, or t
  misc_feature (1281)..(1282): n is a, c, g, or t
  misc_feature (1287)..(1287): n is a, c, g, or t
  misc_feature (1317)..(1317): n is a, c, g, or t
  misc_feature (1331)..(1331): n is a, c, g, or t
  misc_feature (1335)..(1335): n is a, c, g, or t
  misc_feature (1353)..(1353): n is a, c, g, or t
  misc_feature (1359)..(1359): n is a, c, g, or t
  misc_feature (1366)..(1366): n is a, c, g, or t
  misc_feature (1373)..(1373): n is a, c, g, or t
  misc_feature (1384)..(1384): n is a, c, g, or t
  misc_feature (1396)..(1396): n is a, c, g, or t
  misc_feature (1399)..(1399): n is a, c, g, or t
  misc_feature (1403)..(1403): n is a, c, g, or t
  misc_feature (1407)..(1407): n is a, c, g, or t
  misc_feature (1409)..(1409): n is a, c, g, or t
  misc_feature (1411)..(1411): n is a, c, g, or t
  misc_feature (1419)..(1421): n is a, c, g, or t
gantagagaaaattactatgagaggatcgcatcaccatcaccatcacggatcctatttaggtgacactatagaatcgtcgacccacgcgtccgggttttgctctagtgtttgggtttcttcgcggctgctcaagatgaaccgactcttcgggaaagcgaaacccaaggctccgccgcccagcctgactgactgcattggcacggtggacagtagagcagaatccattgacaagaagatttctcgattggatgctgagctagtgaagtataaggatcagatcaagaagatgagagagggtcctgcaaagaatatggtcaagcagaaagccttgcgagttttaaagcaaaagaggatgtatgagcagcagcgggacaatcttgcccaacagtcattcaacatggaacaagccaattataccatccagtctttgaaggacaccaagaccacggttgatgctatgaaactgggagtaaaggaaatgaagaaggcatacaagcaagtgaagatcgaccagattgaggatttacaagaccagctagaggatatgatggaagatgcaaatgaaatccaagaagcactgagtcgcagttatggcaccccagaactggatgaagatgatttagaagcagagttggatgcactaggtgatgagcttctggctgatgaagacagttcttatttggatgaggcagcatctgcacctgcaattccagaaggtgttcccactgatacaaaaaacaaggatggagttctggtggatgaatttggattgccacagatccctgcttcatagatttgcatcattcaagcatatcttgtaaaacaaaccncatattatggggactaggaaatatttatctttccaaatttgccataacagnatttangttttcctttcntttctttgaaaggaaagtttaattaaccttggctcnttttattttttccnataaaaanactcattggctttggnaaaatgcctttcntcccancaaaaattngantcccntttttttctttnggaaaaancnacctccgntttaaaaanaattttttaaacncnnaagaacttgtttttcnttccatnaaaaaaaaatttggaaaaaaaaactnaangggaatnggaacctttnnncaaaaaannaaaaananananannnnnngggggnncncccccccccnaaagggggcccnnntaaccntaattacnagaacnngganncccgnggtaaaaanccnnaagnncccccaaanccccctggantttttnaaaannnttnnccccngggttttttttggggaaaaacccccccttngggaaattttgggnccanggcccaaggggaaaaaanccgggnaaccccnccgaaanccccgggccanaaaattttgggnttncacntgtncngntataaacnnn

SEQ ID NO: 171 - DNA, 1320 bp, Homo Sapiens
  misc_feature (768)..(768): n is a, c, g, or t
  misc_feature (874)..(874): n is a, c, g, or t
  misc_feature (884)..(885): n is a, c, g, or t
  misc_feature (889)..(889): n is a, c, g, or t
  misc_feature (895)..(895): n is a, c, g, or t
  misc_feature (898)..(898): n is a, c, g, or t
  misc_feature (904)..(904): n is a, c, g, or t
  misc_feature (912)..(912): n is a, c, g, or t
  misc_feature (952)..(952): n is a, c, g, or t
  misc_feature (971)..(973): n is a, c, g, or t
  misc_feature (986)..(986): n is a, c, g, or t
  misc_feature (988)..(988): n is a, c, g, or t
  misc_feature (991)..(991): n is a, c, g, or t
  misc_feature (993)..(993): n is a, c, g, or t
  misc_feature (995)..(995): n is a, c, g, or t
  misc_feature (1003)..(1005): n is a, c, g, or t
  misc_feature (1008)..(1008): n is a, c, g, or t
  misc_feature (1018)..(1018): n is a, c, g, or t
  misc_feature (1024)..(1024): n is a, c, g, or t
  misc_feature (1028)..(1030): n is a, c, g, or t
  misc_feature (1033)..(1033): n is a, c, g, or t
  misc_feature (1037)..(1037): n is a, c, g, or t
  misc_feature (1040)..(1040): n is a, c, g, or t
  misc_feature (1051)..(1051): n is a, c, g, or t
  misc_feature (1055)..(1055): n is a, c, g, or t
  misc_feature (1059)..(1059): n is a, c, g, or t
  misc_feature (1068)..(1068): n is a, c, g, or t
  misc_feature (1070)..(1070): n is a, c, g, or t
  misc_feature (1077)..(1077): n is a, c, g, or t
  misc_feature (1082)..(1082): n is a, c, g, or t
  misc_feature (1093)..(1093): n is a, c, g, or t
  misc_feature (1099)..(1099): n is a, c, g, or t
  misc_feature (1109)..(1109): n is a, c, g, or t
  misc_feature (1117)..(1120): n is a, c, g, or t
  misc_feature (1122)..(1124): n is a, c, g, or t
  misc_feature (1133)..(1133): n is a, c, g, or t
  misc_feature (1135)..(1137): n is a, c, g, or t
  misc_feature (1140)..(1141): n is a, c, g, or t
  misc_feature (1143)..(1146): n is a, c, g, or t
  misc_feature (1149)..(1150): n is a, c, g, or t
  misc_feature (1154)..(1154): n is a, c, g, or t
  misc_feature (1158)..(1160): n is a, c, g, or t
  misc_feature (1162)..(1163): n is a, c, g, or t
  misc_feature (1167)..(1173): n is a, c, g, or t
  misc_feature (1177)..(1177): n is a, c, g, or t
  misc_feature (1181)..(1181): n is a, c, g, or t
  misc_feature (1183)..(1183): n is a, c, g, or t
  misc_feature (1191)..(1191): n is a, c, g, or t
  misc_feature (1194)..(1196): n is a, c, g, or t
  misc_feature (1200)..(1203): n is a, c, g, or t
  misc_feature (1215)..(1221): n is a, c, g, or t
  misc_feature (1225)..(1232): n is a, c, g, or t
  misc_feature (1235)..(1247): n is a, c, g, or t
  misc_feature (1252)..(1252): n is a, c, g, or t
  misc_feature (1255)..(1255): n is a, c, g, or t
  misc_feature (1258)..(1259): n is a, c, g, or t
  misc_feature (1262)..(1264): n is a, c, g, or t
  misc_feature (1267)..(1270): n is a, c, g, or t
  misc_feature (1274)..(1274): n is a, c, g, or t
  misc_feature (1276)..(1288): n is a, c, g, or t
  misc_feature (1308)..(1311): n is a, c, g, or t
  misc_feature (1314)..(1314): n is a, c, g, or t
  misc_feature (1318)..(1320): n is a, c, g, or t
tagagaaattactatgagaggatcgcatcaccatcaccatcacggatcctatttaggtgacactatagaatcgtcgacccacgcgtccgcccacgcgtccgagagtgtgtctgcgggagaaagaggagaatcgcccaagcggcctcggaagtcccagggagtggaggcccccgccgtggagccgtgtggtgtatgtgtggtaacaccatgtctgtgcccctgctcaccgatgctgccaccgtgtctggagctgagcgggaaacggccgcggttatttttttacatggacttggagacacagggcacagctgggctgacgccctctccaccatccggctccctcacgtcaagtacatctgtccccatgcgcctaggatccctgtgaccctcaacatgaagatggtgatgccctcctggtttgacctgatggggctgagtccagatgccccagaggacgaggctggcatcaagaaggcagcagagaacatcaaggccttgattgagcatgaaatgaagaacgggatccctgccaatcgaatcgtcctgggaggcttttcacagggcggggccctgtccctctacacggccctcacctgcccccaccctctggctggcatcgtggcgttgagctgctggctgcctctgcaccgggccttcccccaggtgaatgtccccactgacccccccgccctttgtgtctgcatcctcgtggcttggggactgctgcagcactagctttgccctgagtcctgtccggcctccaggcanctaatggcagtgccaaagaacctggccatactccagtgccatggggagctggacccccatggtgcccgtacggtttggggccctgacggctgaaaaaacttccggntctgttgtcnnaacntgccanggntccaanttcaaganatacccggggtgtcatgcacaactcctgtcttcaggtcantggggggaaccattttccnnntcccattttttgncntcnancnaggggccnnncgngatccccctnttaaancccnnnagnaaanggnaacttttaaanaaantttnttgaaaaantngctgccntcctntttaaataaancctggncccaaggganaacccccnnnntnnngggggaaantnnnaannannnnggnncccntttnnnanntaannnnnnnaaancccntntccccccnttnnnaaannnnttttttccaaannnnnnngggnnnnnnnnaannnnnnnnnnnnnttttnttntgnntannnccnnnntttntnnnnnnnnnnnnntttttttttttttttttttnnnnggncccnnn

SEQ ID NO: 172 - DNA, 1346 bp, Homo Sapiens
  misc_feature (9)..(9): n is a, c, g, or t
  misc_feature (756)..(756): n is a, c, g, or t
  misc_feature (771)..(771): n is a, c, g, or t
  misc_feature (786)..(786): n is a, c, g, or t
  misc_feature (818)..(818): n is a, c, g, or t
  misc_feature (868)..(868): n is a, c, g, or t
  misc_feature (903)..(903): n is a, c, g, or t
  misc_feature (908)..(908): n is a, c, g, or t
  misc_feature (916)..(916): n is a, c, g, or t
  misc_feature (924)..(924): n is a, c, g, or t
  misc_feature (927)..(927): n is a, c, g, or t
  misc_feature (929)..(929): n is a, c, g, or t
  misc_feature (932)..(932): n is a, c, g, or t
  misc_feature (936)..(936): n is a, c, g, or t
  misc_feature (969)..(969): n is a, c, g, or t
  misc_feature (979)..(979): n is a, c, g, or t
  misc_feature (984)..(985): n is a, c, g, or t
  misc_feature (994)..(996): n is a, c, g, or t
  misc_feature (998)..(998): n is a, c, g, or t
  misc_feature (1001)..(1001): n is a, c, g, or t
  misc_feature (1005)..(1005): n is a, c, g, or t
  misc_feature (1008)..(1008): n is a, c, g, or t
  misc_feature (1023)..(1025): n is a, c, g, or t
  misc_feature (1027)..(1027): n is a, c, g, or t
  misc_feature (1035)..(1035): n is a, c, g, or t
  misc_feature (1046)..(1048): n is a, c, g, or t
  misc_feature (1052)..(1052): n is a, c, g, or t
  misc_feature (1057)..(1057): n is a, c, g, or t
  misc_feature (1060)..(1060): n is a, c, g, or t
  misc_feature (1066)..(1067): n is a, c, g, or t
  misc_feature (1074)..(1074): n is a, c, g, or t
  misc_feature (1076)..(1076): n is a, c, g, or t
  misc_feature (1078)..(1080): n is a, c, g, or t
  misc_feature (1087)..(1087): n is a, c, g, or t
  misc_feature (1089)..(1090): n is a, c, g, or t
  misc_feature (1092)..(1092): n is a, c, g, or t
  misc_feature (1100)..(1100): n is a, c, g, or t
  misc_feature (1107)..(1107): n is a, c, g, or t
  misc_feature (1111)..(1111): n is a, c, g, or t
  misc_feature (1115)..(1117): n is a, c, g, or t
  misc_feature (1120)..(1120): n is a, c, g, or t
  misc_feature (1122)..(1122): n is a, c, g, or t
  misc_feature (1133)..(1133): n is a, c, g, or t
  misc_feature (1135)..(1135): n is a, c, g, or t
  misc_feature (1137)..(1139): n is a, c, g, or t
  misc_feature (1144)..(1144): n is a, c, g, or t
  misc_feature (1152)..(1155): n is a, c, g, or t
  misc_feature (1163)..(1166): n is a, c, g, or t
  misc_feature (1175)..(1177): n is a, c, g, or t
  misc_feature (1183)..(1184): n is a, c, g, or t
  misc_feature (1188)..(1191): n is a, c, g, or t
  misc_feature (1193)..(1194): n is a, c, g, or t
  misc_feature (1197)..(1200): n is a, c, g, or t
  misc_feature (1204)..(1205): n is a, c, g, or t
  misc_feature (1209)..(1210): n is a, c, g, or t
  misc_feature (1212)..(1212): n is a, c, g, or t
  misc_feature (1215)..(1215): n is a, c, g, or t
  misc_feature (1217)..(1218): n is a, c, g, or t
  misc_feature (1226)..(1232): n is a, c, g, or t
  misc_feature (1235)..(1235): n is a, c, g, or t
  misc_feature (1239)..(1240): n is a, c, g, or t
  misc_feature (1250)..(1255): n is a, c, g, or t
  misc_feature (1264)..(1264): n is a, c, g, or t
  misc_feature (1266)..(1267): n is a, c, g, or t
  misc_feature (1271)..(1271): n is a, c, g, or t
  misc_feature (1275)..(1275): n is a, c, g, or t
  misc_feature (1279)..(1282): n is a, c, g, or t
  misc_feature (1288)..(1293): n is a, c, g, or t
  misc_feature (1297)..(1299): n is a, c, g, or t
  misc_feature (1305)..(1308): n is a, c, g, or t
  misc_feature (1315)..(1327): n is a, c, g, or t
  misc_feature (1331)..(1334): n is a, c, g, or t
  misc_feature (1336)..(1338): n is a, c, g, or t
  misc_feature (1341)..(1345): n is a, c, g, or t
tagagaaanttactatgagaggatcgcatcaccatcaccatcacggatcctatttaggtgacactatagaatcgtcgacccacgcgtccgggagaagcccaggccggccggaagaggagccgagcgcggccggaaggaaccgagcccgtccgaagggagcggagcgcagcctggcctggggcccggtcgagcccgcgccatggcggccgaggcgacagctgtggccggaagcggggctgttggcggctgcctggccaaagacggcttgcagcagtctaagtgcccggacactaccccaaaacggcggcgcgcctcgtcgctgtcgcgtgacgccgagcgccgagcctaccaatggtgccgggagtacttgggcggggcctggcgccgagtgcagcccgaggagctgagggtttaccccgtgaggtgggaggtcaggggtcagcctctccggtgcgcggatcggggtcaggggtcagccgcggggccctcaggatgctccatgttttcgcccccctcttgcgcccgcgcctggggcggggcggggccggcctggccgggagggggccggggccgcggcaggtagggccggccgcgggctgagcgcgcctggtgtgggtctgcagcggaggcctcagcaacctgctcttccgctgctcgctcccggaccacctgcccagcgttggcgaggagccccgggaggtgcttctgcggctgtacggagccatcttgcaggtgagggggttgtgagcgccgcancaccagtggctttanggcctgtcgcttacncgatgcgggtaatattgttcccgttgcgcaanttgaggacaccgaggttcacggtctgaataacacctcattacaccgaaancttgggcctgtattcccaaaacttttggaaagctnaagcnaaaagatnactttaancananganttcnaaaccaaccttgaaaaaaataattgaaaccccnttttttaaanaaaannaaaccaacnnntnaancttntgnttcaaaaacctccannnantttgattnaaaattcccannntttngtggnaanaaaggnnaaccccncntnnnttttccntnngncccttttncctttgncccntttnnnttncnttctttttttnangnnntgaanttccttgnnnntaaaaaannnnatttttccnnnattttnnaaannnntnnttnnnncccnntttnnanaantnnttcaaaannnnnnntgnaaannaattttcaannnnnnattttaaantnnaaantttnaaannnntttttnnnnnntttnnnaaaaannnnatttttnnnnnnnnnnnnntttnnnnannnccnnnnnt

SEQ ID NO: 173 - DNA, 1350 bp, Homo Sapiens
  misc_feature (3)..(3): n is a, c, g, or t
  misc_feature (8)..(8): n is a, c, g, or t
  misc_feature (10)..(10): n is a, c, g, or t
  misc_feature (15)..(16): n is a, c, g, or t
  misc_feature (23)..(23): n is a, c, g, or t
  misc_feature (33)..(33): n is a, c, g, or t
  misc_feature (830)..(830): n is a, c, g, or t
  misc_feature (867)..(867): n is a, c, g, or t
  misc_feature (885)..(885): n is a, c, g, or t
  misc_feature (894)..(894): n is a, c, g, or t
  misc_feature (897)..(897): n is a, c, g, or t
  misc_feature (921)..(921): n is a, c, g, or t
  misc_feature (925)..(925): n is a, c, g, or t
  misc_feature (955)..(955): n is a, c, g, or t
  misc_feature (961)..(961): n is a, c, g, or t
  misc_feature (966)..(966): n is a, c, g, or t
  misc_feature (984)..(984): n is a, c, g, or t
  misc_feature (994)..(994): n is a, c, g, or t
  misc_feature (1002)..(1002): n is a, c, g, or t
  misc_feature (1011)..(1011): n is a, c, g, or t
  misc_feature (1018)..(1019): n is a, c, g, or t
  misc_feature (1022)..(1022): n is a, c, g, or t
  misc_feature (1039)..(1039): n is a, c, g, or t
  misc_feature (1043)..(1044): n is a, c, g, or t
  misc_feature (1047)..(1048): n is a, c, g, or t
  misc_feature (1051)..(1051): n is a, c, g, or t
  misc_feature (1053)..(1053): n is a, c, g, or t
  misc_feature (1060)..(1060): n is a, c, g, or t
  misc_feature (1063)..(1063): n is a, c, g, or t
  misc_feature (1068)..(1068): n is a, c, g, or t
  misc_feature (1071)..(1071): n is a, c, g, or t
  misc_feature (1075)..(1076): n is a, c, g, or t
  misc_feature (1078)..(1079): n is a, c, g, or t
  misc_feature (1081)..(1081): n is a, c, g, or t
  misc_feature (1093)..(1093): n is a, c, g, or t
  misc_feature (1106)..(1106): n is a, c, g, or t
  misc_feature (1112)..(1112): n is a, c, g, or t
  misc_feature (1117)..(1118): n is a, c, g, or t
  misc_feature (1122)..(1122): n is a, c, g, or t
  misc_feature (1124)..(1127): n is a, c, g, or t
  misc_feature (1130)..(1130): n is a, c, g, or t
  misc_feature (1133)..(1134): n is a, c, g, or t
  misc_feature (1136)..(1136): n is a, c, g, or t
  misc_feature (1140)..(1140): n is a, c, g, or t
  misc_feature (1142)..(1142): n is a, c, g, or t
  misc_feature (1147)..(1147): n is a, c, g, or t
  misc_feature (1150)..(1153): n is a, c, g, or t
  misc_feature (1157)..(1157): n is a, c, g, or t
  misc_feature (1159)..(1160): n is a, c, g, or t
  misc_feature (1164)..(1164): n is a, c, g, or t
  misc_feature (1168)..(1168): n is a, c, g, or t
  misc_feature (1170)..(1171): n is a, c, g, or t
  misc_feature (1173)..(1173): n is a, c, g, or t
  misc_feature (1175)..(1177): n is a, c, g, or t
  misc_feature (1183)..(1184): n is a, c, g, or t
  misc_feature (1186)..(1186): n is a, c, g, or t
  misc_feature (1192)..(1193): n is a, c, g, or t
  misc_feature (1197)..(1197): n is a, c, g, or t
  misc_feature (1199)..(1199): n is a, c, g, or t
  misc_feature (1202)..(1203): n is a, c, g, or t
  misc_feature (1206)..(1206): n is a, c, g, or t
  misc_feature (1218)..(1218): n is a, c, g, or t
  misc_feature (1221)..(1224): n is a, c, g, or t
  misc_feature (1227)..(1229): n is a, c, g, or t
  misc_feature (1233)..(1236): n is a, c, g, or t
  misc_feature (1238)..(1238): n is a, c, g, or t
  misc_feature (1244)..(1244): n is a, c, g, or t
  misc_feature (1255)..(1259): n is a, c, g, or t
  misc_feature (1266)..(1266): n is a, c, g, or t
  misc_feature (1269)..(1269): n is a, c, g, or t
  misc_feature (1274)..(1274): n is a, c, g, or t
  misc_feature (1277)..(1281): n is a, c, g, or t
  misc_feature (1284)..(1288): n is a, c, g, or t
  misc_feature (1292)..(1294): n is a, c, g, or t
  misc_feature (1305)..(1308): n is a, c, g, or t
  misc_feature (1327)..(1328): n is a, c, g, or t
  misc_feature (1331)..(1332): n is a, c, g, or t
  misc_feature (1338)..(1338): n is a, c, g, or t
  misc_feature (1341)..(1341): n is a, c, g, or t
  misc_feature (1344)..(1350): n is a, c, g, or t
atngaganantactnngataggntcgcatcacnatcaccatcacggatcctatttagggtgacactatagaatcgtcgacccacgcgtccgcttcttcttctcggtggcggccccagcaaagacccccccgagtccacagcggcagcaaagttcccgcgctcaccgtcggccacgaagagcagcagggcatgcagcagcagaggcggcagctcccagccctcaactccttaccccagtttgggcaaccagctgccccgctgtttggcccaggcctgggccatgacggatgggtgggcgcccggggccgcgagaagggcggaacgctgtgcccagccggagactacgctgggtggcggcggcagcgccgggagtctgcagtgcgcgagggagaagtgagcgcacagcgcccagcgagcaggtgcctgcggcgcggagagcgcacacgctagccagcccgcagcggccgacacttggaccaacaaaagatattttcttctcagtcatgcatgcaaatatatggaagatcttagaaaattgtggaaagtggggcatactgaacaaaatcactgccatcagagagaatgaagtgatgcaagatcaggatgtgtcaggaagcccaggcgtgtgtcgccacgttgatctctgtgtgaaataggacggactcagtacctgcagctagacaacgctggagaaactccaaaggactgagtgccgcccaggcttcaggagagtaagacaacagacactatgcacttttctaatgtggccggcactctgtgcttgcaatcacatatgtgccacagacaggatttctatcaaacaaaccaanaagaacagatggatgccaagccccgttgtcactttcntggtgcgtttaacagganccagggganaantccagtttggggcgtcttgggaantttnccacatcatccatgaaattctgtggtgganttgtcncccanaccatggggtgggttttnatggcttggngggtcggnaattgcaantgaaccnnaancatgtttggcttttttnttannccnnaananccggggnatngtttnccnaaannanngntttttttaaaanactggaaaaaaanaaaggntttgnntttngnnnnggnaanntnaaantnttttnttnnnnaaangnngaantaangnnantnnnaaattnngntttccnnaaantnttnnaantaaaaaaaaaanccnnnnttnnntggnnnngnattttnaaaagggaaannnnnaaaattnccnaaaanttnnnnnggnnnnnaaannnttttttttttnnnnaaaaaaaaatttttttttnnaanntttttnaanaannnnnnn

SEQ ID NO: 174 - DNA, 1422 bp, Homo Sapiens
  misc_feature (9)..(9): n is a, c, g, or t
  misc_feature (826)..(826): n is a, c, g, or t
  misc_feature (966)..(966): n is a, c, g, or t
  misc_feature (976)..(976): n is a, c, g, or t
  misc_feature (990)..(990): n is a, c, g, or t
  misc_feature (992)..(992): n is a, c, g, or t
  misc_feature (999)..(999): n is a, c, g, or t
  misc_feature (1022)..(1022): n is a, c, g, or t
  misc_feature (1043)..(1043): n is a, c, g, or t
  misc_feature (1052)..(1052): n is a, c, g, or t
  misc_feature (1061)..(1061): n is a, c, g, or t
  misc_feature (1089)..(1089): n is a, c, g, or t
  misc_feature (1128)..(1128): n is a, c, g, or t
  misc_feature (1133)..(1133): n is a, c, g, or t
  misc_feature (1149)..(1149): n is a, c, g, or t
  misc_feature (1151)..(1152): n is a, c, g, or t
  misc_feature (1156)..(1156): n is a, c, g, or t
  misc_feature (1165)..(1165): n is a, c, g, or t
  misc_feature (1175)..(1175): n is a, c, g, or t
  misc_feature (1185)..(1185): n is a, c, g, or t
  misc_feature (1190)..(1190): n is a, c, g, or t
  misc_feature (1197)..(1197): n is a, c, g, or t
  misc_feature (1203)..(1204): n is a, c, g, or t
  misc_feature (1206)..(1206): n is a, c, g, or t
  misc_feature (1218)..(1218): n is a, c, g, or t
  misc_feature (1222)..(1222): n is a, c, g, or t
  misc_feature (1226)..(1226): n is a, c, g, or t
  misc_feature (1234)..(1234): n is a, c, g, or t
  misc_feature (1237)..(1237): n is a, c, g, or t
  misc_feature (1242)..(1243): n is a, c, g, or t
  misc_feature (1249)..(1249): n is a, c, g, or t
  misc_feature (1260)..(1260): n is a, c, g, or t
  misc_feature (1268)..(1268): n is a, c, g, or t
  misc_feature (1274)..(1274): n is a, c, g, or t
  misc_feature (1277)..(1278): n is a, c, g, or t
  misc_feature (1282)..(1282): n is a, c, g, or t
  misc_feature (1284)..(1284): n is a, c, g, or t
  misc_feature (1286)..(1287): n is a, c, g, or t
  misc_feature (1291)..(1291): n is a, c, g, or t
  misc_feature (1293)..(1294): n is a, c, g, or t
  misc_feature (1305)..(1305): n is a, c, g, or t
  misc_feature (1307)..(1307): n is a, c, g, or t
  misc_feature (1320)..(1322): n is a, c, g, or t
  misc_feature (1326)..(1326): n is a, c, g, or t
  misc_feature (1331)..(1331): n is a, c, g, or t
  misc_feature (1333)..(1333): n is a, c, g, or t
  misc_feature (1341)..(1341): n is a, c, g, or t
  misc_feature (1344)..(1346): n is a, c, g, or t
  misc_feature (1351)..(1351): n is a, c, g, or t
  misc_feature (1355)..(1355): n is a, c, g, or t
  misc_feature (1358)..(1360): n is a, c, g, or t
  misc_feature (1371)..(1371): n is a, c, g, or t
  misc_feature (1374)..(1374): n is a, c, g, or t
  misc_feature (1378)..(1378): n is a, c, g, or t
  misc_feature (1382)..(1382): n is a, c, g, or t
  misc_feature (1385)..(1385): n is a, c, g, or t
  misc_feature (1391)..(1391): n is a, c, g, or t
  misc_feature (1396)..(1396): n is a, c, g, or t
  misc_feature (1399)..(1399): n is a, c, g, or t
  misc_feature (1405)..(1405): n is a, c, g, or t
  misc_feature (1407)..(1407): n is a, c, g, or t
  misc_feature (1409)..(1409): n is a, c, g, or t
  misc_feature (1412)..(1412): n is a, c, g, or t
aatagaganattactatgagaggatcgcatcaccatcaccatcacggatcctatttaggtgacactatagaatcgtcgacccacgcgtccgcccacgcgtccgctcttcgtctttgcagcgtagcccgagtcggtcagcgccggaggacctcagcagccatgtcgaagccccatagtgaagccgggactgccttcattcagacccagcagctgcacgcagccatggctgacacattcctggagcacatgtgccgcctggacattgattcaccacccatcacagcccggaacactggcatcatctgtaccattggcccagcttcccgatcagtggagacgttgaaggagatgattaagtctggaatgaatgtggctcgtctgaacttctctcatggaactcatgagtaccatgcggagaccatcaagaatgtgcgcacagccacggaaagctttgcttctgaccccatcctctaccggcccgttgctgtggctctagacactaaaggacctgagatccgaactgggctcatcaagggcagcggcactgcagaggtggagctgaagaagggagccactctcaaaatcacgctggataacgcctacatggaaaagtgtgacgagaacatcctgtggctggactacaagaacatctgcaaggtggtggaagtgggcagcaagatctacgtggatgatgggcttatttctctccaggtgaagcagaaaggtgccgacttcctggtgacggaggtggaaaatggtggctccttgggcagcaagaagggtgtgaaccttcctggggctgctgtggacttgcctgctgtgtcgnagaaggacatccaggatctgaagtttggggtcgagcaggatgttgatatggtgtttgcgtcattcatccgcaaggcatctgatgtccatgaagttaggaaggtcctggggaaagaagggaaagaacatcaagattatcancaaaatcganaatcatgggggggntncggaagnttgatgaaatcctggaaggccantgatgggaatcatggggggcncgggggganttaaggcanttgaaaatcctggcaaaaaaagtcttcnttgctcaaaaaaataataattggaacggggcaacccaanctggnaaacctgtcttctttncnnttcnaatgctggnaaacatgtanaaaaaccccnccccnctcggcnaaaggnntnatgggccaaagnatcnggangaaccaanttnttttnnttttgnaaaaaaccaangggaattnttgggnggnnggcnancnncctnannctggggggaangncccttttcccccnnngttnaaaantngggaaccnatnnnccaanattnaannnggcgggggggnggntttnattnttnaatttnatttnaangggggncncnggnaaaacccccc

SEQ ID NO: 175 - DNA, 1410 bp, Homo Sapiens
  misc_feature (595)..(595): n is a, c, g, or t
  misc_feature (600)..(600): n is a, c, g, or t
  misc_feature (679)..(679): n is a, c, g, or t
  misc_feature (689)..(689): n is a, c, g, or t
  misc_feature (706)..(706): n is a, c, g, or t
  misc_feature (709)..(709): n is a, c, g, or t
  misc_feature (713)..(713): n is a, c, g, or t
  misc_feature (717)..(718): n is a, c, g, or t
  misc_feature (723)..(723): n is a, c, g, or t
  misc_feature (734)..(734): n is a, c, g, or t
  misc_feature (740)..(740): n is a, c, g, or t
  misc_feature (762)..(762): n is a, c, g, or t
  misc_feature (764)..(765): n is a, c, g, or t
  misc_feature (778)..(778): n is a, c, g, or t
  misc_feature (785)..(785): n is a, c, g, or t
  misc_feature (796)..(796): n is a, c, g, or t
  misc_feature (808)..(808): n is a, c, g, or t
  misc_feature (813)..(813): n is a, c, g, or t
  misc_feature (815)..(815): n is a, c, g, or t
  misc_feature (817)..(817): n is a, c, g, or t
  misc_feature (819)..(820): n is a, c, g, or t
  misc_feature (822)..(822): n is a, c, g, or t
  misc_feature (825)..(825): n is a, c, g, or t
  misc_feature (829)..(829): n is a, c, g, or t
  misc_feature (837)..(837): n is a, c, g, or t
  misc_feature (839)..(839): n is a, c, g, or t
  misc_feature (841)..(842): n is a, c, g, or t
  misc_feature (845)..(845): n is a, c, g, or t
  misc_feature (853)..(853): n is a, c, g, or t
  misc_feature (856)..(856): n is a, c, g, or t
  misc_feature (858)..(858): n is a, c, g, or t
  misc_feature (861)..(861): n is a, c, g, or t
  misc_feature (863)..(863): n is a, c, g, or t
  misc_feature (865)..(865): n is a, c, g, or t
  misc_feature (867)..(867): n is a, c, g, or t
  misc_feature (870)..(870): n is a, c, g, or t
  misc_feature (874)..(874): n is a, c, g, or t
  misc_feature (876)..(876): n is a, c, g, or t
  misc_feature (878)..(879): n is a, c, g, or t
  misc_feature (888)..(888): n is a, c, g, or t
  misc_feature (890)..(891): n is a, c, g, or t
  misc_feature (893)..(895): n is a, c, g, or t
  misc_feature (906)..(907): n is a, c, g, or t
  misc_feature (909)..(909): n is a, c, g, or t
  misc_feature (914)..(914): n is a, c, g, or t
  misc_feature (918)..(919): n is a, c, g, or t
  misc_feature (921)..(921): n is a, c, g, or t
  misc_feature (930)..(930): n is a, c, g, or t
  misc_feature (939)..(940): n is a, c, g, or t
  misc_feature (942)..(945): n is a, c, g, or t
  misc_feature (950)..(951): n is a, c, g, or t
  misc_feature (954)..(954): n is a, c, g, or t
  misc_feature (957)..(958): n is a, c, g, or t
  misc_feature (960)..(960): n is a, c, g, or t
  misc_feature (966)..(967): n is a, c, g, or t
  misc_feature (973)..(973): n is a, c, g, or t
  misc_feature (976)..(976): n is a, c, g, or t
  misc_feature (979)..(982): n is a, c, g, or t
  misc_feature (984)..(984): n is a, c, g, or t
  misc_feature (987)..(988): n is a, c, g, or t
  misc_feature (994)..(994): n is a, c, g, or t
  misc_feature (998)..(999): n is a, c, g, or t
  misc_feature (1002)..(1003): n is a, c, g, or t
  misc_feature (1005)..(1007): n is a, c, g, or t
  misc_feature (1012)..(1012): n is a, c, g, or t
  misc_feature (1014)..(1014): n is a, c, g, or t
  misc_feature (1017)..(1018): n is a, c, g, or t
  misc_feature (1022)..(1023): n is a, c, g, or t
  misc_feature (1033)..(1033): n is a, c, g, or t
  misc_feature (1043)..(1043): n is a, c, g, or t
  misc_feature (1045)..(1045): n is a, c, g, or t
  misc_feature (1047)..(1047): n is a, c, g, or t
  misc_feature (1055)..(1056): n is a, c, g, or t
  misc_feature (1063)..(1063): n is a, c, g, or t
  misc_feature (1067)..(1067): n is a, c, g, or t
  misc_feature (1077)..(1079): n is a, c, g, or t
  misc_feature (1081)..(1083): n is a, c, g, or t
  misc_feature (1086)..(1086): n is a, c, g, or t
  misc_feature (1088)..(1088): n is a, c, g, or t
  misc_feature (1092)..(1092): n is a, c, g, or t
  misc_feature (1102)..(1105): n is a, c, g, or t
  misc_feature (1108)..(1108): n is a, c, g, or t
  misc_feature (1112)..(1112): n is a, c, g, or t
  misc_feature (1117)..(1117): n is a, c, g, or t
  misc_feature (1123)..(1123): n is a, c, g, or t
  misc_feature (1126)..(1126): n is a, c, g, or t
  misc_feature (1129)..(1131): n is a, c, g, or t
  misc_feature (1133)..(1133): n is a, c, g, or t
  misc_feature (1135)..(1141): n is a, c, g, or t
  misc_feature (1143)..(1144): n is a, c, g, or t
  misc_feature (1146)..(1146): n is a, c, g, or t
  misc_feature (1148)..(1149): n is a, c, g, or t
  misc_feature (1151)..(1151): n is a, c, g, or t
  misc_feature (1154)..(1154): n is a, c, g, or t
  misc_feature (1156)..(1156): n is a, c, g, or t
  misc_feature (1162)..(1164): n is a, c, g, or t
  misc_feature (1166)..(1166): n is a, c, g, or t
  misc_feature (1170)..(1170): n is a, c, g, or t
  misc_feature (1173)..(1176): n is a, c, g, or t
  misc_feature (1178)..(1178): n is a, c, g, or t
  misc_feature (1182)..(1182): n is a, c, g, or t
  misc_feature (1187)..(1187): n is a, c, g, or t
  misc_feature (1191)..(1193): n is a, c, g, or t
  misc_feature (1198)..(1198): n is a, c, g, or t
  misc_feature (1201)..(1201): n is a, c, g, or t
  misc_feature (1207)..(1207): n is a, c, g, or t
  misc_feature (1209)..(1210): n is a, c, g, or t
  misc_feature (1213)..(1213): n is a, c, g, or t
  misc_feature (1215)..(1216): n is a, c, g, or t
  misc_feature (1222)..(1222): n is a, c, g, or t
  misc_feature (1228)..(1229): n is a, c, g, or t
  misc_feature (1232)..(1232): n is a, c, g, or t
  misc_feature (1236)..(1237): n is a, c, g, or t
  misc_feature (1240)..(1240): n is a, c, g, or t
  misc_feature (1242)..(1242): n is a, c, g, or t
  misc_feature (1245)..(1245): n is a, c, g, or t
  misc_feature (1249)..(1249): n is a, c, g, or t
  misc_feature (1251)..(1251): n is a, c, g, or t
  misc_feature (1254)..(1254): n is a, c, g, or t
  misc_feature (1256)..(1256): n is a, c, g, or t
  misc_feature (1261)..(1266): n is a, c, g, or t
  misc_feature (1269)..(1269): n is a, c, g, or t
  misc_feature (1271)..(1272): n is a, c, g, or t
  misc_feature (1274)..(1275): n is a, c, g, or t
  misc_feature (1277)..(1278): n is a, c, g, or t
  misc_feature (1280)..(1280): n is a, c, g, or t
  misc_feature (1282)..(1282): n is a, c, g, or t
  misc_feature (1284)..(1284): n is a, c, g, or t
  misc_feature (1286)..(1286): n is a, c, g, or t
  misc_feature (1290)..(1290): n is a, c, g, or t
  misc_feature (1292)..(1293): n is a, c, g, or t
  misc_feature (1296)..(1297): n is a, c, g, or t
  misc_feature (1299)..(1301): n is a, c, g, or t
  misc_feature (1306)..(1306): n is a, c, g, or t
  misc_feature (1312)..(1312): n is a, c, g, or t
  misc_feature (1316)..(1319): n is a, c, g, or t
  misc_feature (1322)..(1325): n is a, c, g, or t
  misc_feature (1327)..(1327): n is a, c, g, or t
  misc_feature (1330)..(1331): n is a, c, g, or t
  misc_feature (1334)..(1336): n is a, c, g, or t
  misc_feature (1339)..(1343): n is a, c, g, or t
  misc_feature (1345)..(1345): n is a, c, g, or t
  misc_feature (1348)..(1348): n is a, c, g, or t
  misc_feature (1350)..(1350): n is a, c, g, or t
  misc_feature (1352)..(1358): n is a, c, g, or t
  misc_feature (1360)..(1364): n is a, c, g, or t
  misc_feature (1368)..(1368): n is a, c, g, or t
  misc_feature (1370)..(1370): n is a, c, g, or t
  misc_feature (1373)..(1374): n is a, c, g, or t
  misc_feature (1378)..(1378): n is a, c, g, or t
  misc_feature (1382)..(1384): n is a, c, g, or t
  misc_feature (1386)..(1386): n is a, c, g, or t
  misc_feature (1388)..(1388): n is a, c, g, or t
  misc_feature (1391)..(1391): n is a, c, g, or t
  misc_feature (1400)..(1400): n is a, c, g, or t
  misc_feature (1402)..(1402): n is a, c, g, or t
  misc_feature (1404)..(1407): n is a, c, g, or t
  misc_feature (1409)..(1410): n is a, c, g, or t
atagagagattactatgagaggatcgcatcaccatcaccatcacggatcctatttaggtgacactatagaatcgtcgacccacgcgtccgtgcgggctcatcctcaattcttagcgatggagtgtacgagaggcacatggaccctctgctgctaccaggcgagctcgcgagccccagccaggcccttggagctggggagatcccggcaccttctgagacaccctggctttctccggaccccctgtttctggaacagaggagggtcagagaagcaaagaccgaagaggacggccctgccaacaccgagcagaagctgaagtcctttccagaggaccctcagcacctgggggagtggggccacctggaccctgccgaggagaacctgaagagctaccggaagctgctcctgtgggggtatcagctttcccagcctgacgctgcctccaggctggacactgaggaactccggttggtggaaagagatccacaaggaagcagcctcccagaaggcgggaggcggcaggagagcgctgggtgcgcctgcgaggaggccgcccccgcgggggtgctgcctgagctgcctacggaggcgccncctgnggacgcccttgccgatcccccgtcgggcaccactgaggaggaggaagaacagcctgggaaggccccggacccgcagganccccaggacncagaagtccgactctgnccnccgnaatnncaaangcaatccgtcntccaancaaccctggccccggaaagggncnncgactaaactggngaaaccnataaagccccncccccgaagaanggggnancngnnanaancctncaaaggcntntnnaanctccggtnaananccnanangnttngaancngnntaaggtccntnnannnctaaaaaaccnngnctttntccnncngaaaatccntaatccttnnannnnaattnntanaanncnttttcnnatcggnttntcnnnncntannggaaanaccnnaannannnttgcngnccnnaaannctaatcctgnaaaggactantntnaaaaaacnnccattanaccntgaccctaannnannnctnanaaantcttatcaannnnaanaaanttctnctctcngcnaannncnannnnnnnannantnnanctncncttaannncnacangannnnantgcnaagcntccnnnaaaanttnctaaangnngantnnccctcncccctnntantaannaananttnactntnttncnttctnnnnnnagnanncnntnnancncnantcanannaanntnnntactnctacanctcnnnnagnnnntnctnncannntcnnnnncnttnantnnnnnnnannnnnacantnacnntatnaagnnnananatntttaacatnanannnnann

SEQ ID NO: 176 - DNA, 1200 bp, Homo Sapiens
  misc_feature (1)..(1): n is a, c, g, or t
  misc_feature (868)..(868): n is a, c, g, or t
  misc_feature (929)..(929): n is a, c, g, or t
  misc_feature (931)..(931): n is a, c, g, or t
  misc_feature (947)..(947): n is a, c, g, or t
  misc_feature (949)..(949): n is a, c, g, or t
  misc_feature (964)..(964): n is a, c, g, or t
  misc_feature (986)..(986): n is a, c, g, or t
  misc_feature (1006)..(1006): n is a, c, g, or t
  misc_feature (1011)..(1011): n is a, c, g, or t
  misc_feature (1014)..(1014): n is a, c, g, or t
  misc_feature (1016)..(1016): n is a, c, g, or t
  misc_feature (1027)..(1027): n is a, c, g, or t
  misc_feature (1034)..(1034): n is a, c, g, or t
  misc_feature (1036)..(1036): n is a, c, g, or t
  misc_feature (1042)..(1042): n is a, c, g, or t
  misc_feature (1045)..(1045): n is a, c, g, or t
  misc_feature (1073)..(1073): n is a, c, g, or t
  misc_feature (1075)..(1075): n is a, c, g, or t
  misc_feature (1078)..(1078): n is a, c, g, or t
  misc_feature (1086)..(1086): n is a, c, g, or t
  misc_feature (1089)..(1089): n is a, c, g, or t
  misc_feature (1092)..(1092): n is a, c, g, or t
  misc_feature (1094)..(1094): n is a, c, g, or t
  misc_feature (1097)..(1097): n is a, c, g, or t
  misc_feature (1128)..(1128): n is a, c, g, or t
  misc_feature (1131)..(1131): n is a, c, g, or t
  misc_feature (1139)..(1139): n is a, c, g, or t
  misc_feature (1143)..(1143): n is a, c, g, or t
  misc_feature (1147)..(1147): n is a, c, g, or t
  misc_feature (1149)..(1149): n is a, c, g, or t
  misc_feature (1164)..(1165): n is a, c, g, or t
  misc_feature (1169)..(1169): n is a, c, g, or t
  misc_feature (1178)..(1178): n is a, c, g, or t
  misc_feature (1184)..(1184): n is a, c, g, or t
naatagagaaattactatgagaggatcgcatcaccatcaccatcacggatcctatttaggtgacactatagaatcgtcgacccacgcgtccgcaaatgcacgcgacaggaaccagcgtcgtctcggagatgcagccaagaaagccatcagtaaattgacaaccaggacagtaaagaagggtgacaaggaaactgacccagactttgatcattgtgcagtctgcatagagagctataagcagaatgatgtcgtccgaattctcccctgcaagcatgttttccacaaatcctgcgtggatccctggcttagtgaacattgtacctgtcctatgtgcaaacttaatatattgaaggccctgggaattgtgccgaatttgccatgtactgataacgtagcattcgatatggaaaggctcaccagaacccaagctgttaaccgaagatcagccctcggcgacctcgccggcgacaactcccttggccttgagccacttcgaacttcggggatctcacctcttcctcaggatggggagctcactccgagaacaggagaaatcaacattgcagtaacaagtggtcacttctttcatcgaaactccttgtcccctcggagtctggtgtatgaaagtgaattctccaccatcgaaccttctttggacatgtatgatgagaacaaaacctgaattttaaacatggcctggctgttggggtcactgcttttgtgatttgatttctgatcacctttcttattttgtattctcctgtcagcatccgtttttggaagaatggcagcactttccaagcacaggttgggggttcagggttaatttgcaaagttccccccaaggtgaggctttgaaggacagtancattgcccaaggtgagccttgggggtattgaaaaaccccgccccaagctgaatcattgaangngggcccccccagcaangnctggctgttttccanaaaaaaggccgggccccagganttaatgttgcattgcaaacnctttntgnancaatcccattnctgtttntncaccanggnaagctgggggttttttaacatccttttngnggnccccgctnaanaancnaanctgccccggggggaaaaaccttcctaccccncgngggaaaanaggngctngncccctgaactggccnnggangtccccccncccttnatcaacttccggggga

SEQ ID NO: 177 - DNA, 1200 bp, Homo Sapiens
  misc_feature (880)..(880): n is a, c, g, or t
  misc_feature (913)..(913): n is a, c, g, or t
  misc_feature (947)..(947): n is a, c, g, or t
  misc_feature (962)..(962): n is a, c, g, or t
  misc_feature (974)..(974): n is a, c, g, or t
  misc_feature (989)..(989): n is a, c, g, or t
  misc_feature (994)..(994): n is a, c, g, or t
  misc_feature (999)..(999): n is a, c, g, or t
  misc_feature (1002)..(1003): n is a, c, g, or t
  misc_feature (1011)..(1011): n is a, c, g, or t
  misc_feature (1046)..(1046): n is a, c, g, or t
  misc_feature (1073)..(1073): n is a, c, g, or t
  misc_feature (1075)..(1075): n is a, c, g, or t
  misc_feature (1077)..(1077): n is a, c, g, or t
  misc_feature (1082)..(1086): n is a, c, g, or t
  misc_feature (1088)..(1088): n is a, c, g, or t
  misc_feature (1097)..(1097): n is a, c, g, or t
  misc_feature (1103)..(1104): n is a, c, g, or t
  misc_feature (1111)..(1112): n is a, c, g, or t
  misc_feature (1117)..(1117): n is a, c, g, or t
  misc_feature (1126)..(1126): n is a, c, g, or t
  misc_feature (1145)..(1145): n is a, c, g, or t
  misc_feature (1153)..(1153): n is a, c, g, or t
  misc_feature (1158)..(1158): n is a, c, g, or t
  misc_feature (1163)..(1163): n is a, c, g, or t
  misc_feature (1167)..(1167): n is a, c, g, or t
  misc_feature (1173)..(1173): n is a, c, g, or t
  misc_feature (1184)..(1186): n is a, c, g, or t
  misc_feature (1189)..(1189): n is a, c, g, or t
  misc_feature (1197)..(1197): n is a, c, g, or t
tagagaaattactatgagaggatcgcatcaccatcaccatcacggatcctatttaggtgacactatagaatcgtcgacccacgcgtccgggctcatccaaaatagaggaagcatgcgaaatctacgccagagcagcaaacatgttcaaaatggccaaaaactggagtgctgctggaaacgcgttctgccaggctgcacagctgcacctgcagctccagagcaagcacgacgcagccacctgctttgtggacgctggcaacgcattcaagaaagccgacccccaagaggccattaactgtttgatgcgagcaatcgagatctacacagacatgggccgattcacgattgcggccaagcaccacatctccattgctgagatctatgagacagagttggtggacatcgagaaggccattgcccactacgagcagtctgcagactactacaaaggcgaggagtccaacagctcagccaacaagtgtctgctgaaggtggctggttacgctgcgctgctggagcagtatcagaaggccattgacatctacgaacaggtggggaccaatgccatggacagccccctcctcaagtacagcgccaaagactacttcttcaaggcggccctctgccacttctgcatcgacatgctcaacgccaagctggctgtccaaaagtatgaggagctgttcccagctttctctgattcccgggaatgcaagttgatgaaaaaattgctagaggcccacgaggagcagaatgtggacagctacaccgagtcggtgaaggaatacgactccatctcccggctggaccagtggctcaccaccatgctgctgcgcatcaagaagaccatccagggcgatgaggaggacctgcgctaaanccccacccagcccccccagtggcccgtctttcntgtcccatctgctcaaaaaagaaggtgggggccnaaaacttgctggaanagcttccctccnttcccatctggggantgccncgggnccnnattgggcnaggggcacccggggtcaacatgcaagggcccccanaagcccaggctgctggccggaaatccncntnttttnnnnnanattccttgncccctnntccattnnttaancccccatangggcccttccccccaaaancagctgtnaaaanttttnaaanaaactntttctaagggnnnctnccgggaanttg

SEQ ID NO: 178 - DNA, 1372 bp, Homo Sapiens
  misc_feature (776)..(776): n is a, c, g, or t
  misc_feature (873)..(873): n is a, c, g, or t
  misc_feature (881)..(881): n is a, c, g, or t
  misc_feature (913)..(913): n is a, c, g, or t
  misc_feature (922)..(922): n is a, c, g, or t
  misc_feature (965)..(965): n is a, c, g, or t
  misc_feature (974)..(974): n is a, c, g, or t
  misc_feature (977)..(977): n is a, c, g, or t
  misc_feature (1004)..(1004): n is a, c, g, or t
  misc_feature (1009)..(1009): n is a, c, g, or t
  misc_feature (1021)..(1021): n is a, c, g, or t
  misc_feature (1029)..(1029): n is a, c, g, or t
  misc_feature (1032)..(1032): n is a, c, g, or t
  misc_feature (1044)..(1044): n is a, c, g, or t
  misc_feature (1051)..(1051): n is a, c, g, or t
  misc_feature (1081)..(1082): n is a, c, g, or t
  misc_feature (1090)..(1090): n is a, c, g, or t
  misc_feature (1101)..(1101): n is a, c, g, or t
  misc_feature (1103)..(1104): n is a, c, g, or t
  misc_feature (1106)..(1106): n is a, c, g, or t
  misc_feature (1129)..(1129): n is a, c, g, or t
  misc_feature (1138)..(1138): n is a, c, g, or t
  misc_feature (1142)..(1142): n is a, c, g, or t
  misc_feature (1155)..(1155): n is a, c, g, or t
  misc_feature (1159)..(1159): n is a, c, g, or t
  misc_feature (1163)..(1164): n is a, c, g, or t
  misc_feature (1166)..(1166): n is a, c, g, or t
  misc_feature (1170)..(1171): n is a, c, g, or t
  misc_feature (1173)..(1173): n is a, c, g, or t
  misc_feature (1183)..(1183): n is a, c, g, or t
  misc_feature (1197)..(1197): n is a, c, g, or t
  misc_feature (1200)..(1201): n is a, c, g, or t
  misc_feature (1209)..(1210): n is a, c, g, or t
  misc_feature (1215)..(1216): n is a, c, g, or t
  misc_feature (1222)..(1222): n is a, c, g, or t
  misc_feature (1224)..(1224): n is a, c, g, or t
  misc_feature (1228)..(1228): n is a, c, g, or t
  misc_feature (1237)..(1237): n is a, c, g, or t
  misc_feature (1240)..(1241): n is a, c, g, or t
  misc_feature (1246)..(1247): n is a, c, g, or t
  misc_feature (1249)..(1249): n is a, c, g, or t
  misc_feature (1266)..(1266): n is a, c, g, or t
  misc_feature (1270)..(1273): n is a, c, g, or t
  misc_feature (1276)..(1276): n is a, c, g, or t
  misc_feature (1279)..(1279): n is a, c, g, or t
  misc_feature (1282)..(1282): n is a, c, g, or t
  misc_feature (1285)..(1288): n is a, c, g, or t
  misc_feature (1292)..(1292): n is a, c, g, or t
  misc_feature (1295)..(1295): n is a, c, g, or t
  misc_feature (1297)..(1300): n is a, c, g, or t
  misc_feature (1304)..(1307): n is a, c, g, or t
  misc_feature (1310)..(1312): n is a, c, g, or t
  misc_feature (1323)..(1323): n is a, c, g, or t
  misc_feature (1325)..(1326): n is a, c, g, or t
  misc_feature (1329)..(1329): n is a, c, g, or t
  misc_feature (1333)..(1333): n is a, c, g, or t
  misc_feature (1335)..(1335): n is a, c, g, or t
  misc_feature (1341)..(1341): n is a, c, g, or t
  misc_feature (1349)..(1350): n is a, c, g, or t
  misc_feature (1353)..(1354): n is a, c, g, or t
  misc_feature (1356)..(1358): n is a, c, g, or t
  misc_feature (1361)..(1364): n is a, c, g, or t
  misc_feature (1366)..(1366): n is a, c, g, or t
  misc_feature (1368)..(1368): n is a, c, g, or t
  misc_feature (1371)..(1371): n is a, c, g, or t
agagaaattactatgagaggatcgcatcaccatcaccatcacggatcctatttaggtgacactatagaatcgtcgacccacgcgtccgcgctccggcaaggtggccttccgcgactgcgagggccgttacctggcgccgtcggggcccagcggcacgctcaaggcgggcaaggccaccaaggtgggcaaggacgagctctttgctctggagcagagctgcgcccaggtcgtgctgcaggcggccaacgagaggaacgtgtccacgcgccagggtatggacctgtctgccaatcaggacgaggagaccgaccaggagaccttccagctggagatcgaccgcgacaccaaaaagtgtgccttccgtacccacacgggcaagtactggacgctgacggccaccgggggcgtgcagtccaccgcctccagcaagaatgccagctgctactttgacatcgagtggcgtgaccggcgcatcacactgagggcgtccaatggcaagtttgtgacctccaagaagaatgggcagctggccgcctcggtggagacagcaggggactcagagctcttcctcatgaagctcatcaaccgccccatcatcgtgttccgcggggagcatggcttcatcggctgccgcaaggtcacgggcaccctggacgccaaccgctccagctatgacgtcttccagctggagttcaacgatggcgcctacaacatcaaagactccacaggcaaatactggacggtgggcagtgactccgcggtcaccagcagcggcnacactcctgtggacttcttcttcgagttctgcgactataacaaggtggccatcaaggttggggcgggcgctacctgaaagggcgaccacgcaggcgntcctgaangcctcggcggaaaaccgtggacccccgcctcnctctgggantactaagggcggcccgttctttccccgcccttgcccaaatggngggctcctngcnaacccttccttgttaacccctttttcnccaangtgggcttccangggggggnagnaaaacccccttngcttttnaaattggaaaaaccccaaaaaaaaacgggnncccccacntttcccccctntnnantccccatcttcccctcccgcccngggtttccnaatncccttgggttaantggnttgnntntggnncntggaaagaanttaaaaacccctgnccnnttttttcnnaagannaaattngncccnttttttttnaanntaaanntnttaaacttttttttttnaaannnnaanaanttnggnnnnaaanccntnnnntaannnnaannnaaaccctttcncnntanaaantncctatntctttttnnatnnannnttnnnnantnttnt

SEQ ID NO: 179 - DNA, 1396 bp, Homo Sapiens
  misc_feature (1)..(1): n is a, c, g, or t
  misc_feature (763)..(763): n is a, c, g, or t
  misc_feature (786)..(786): n is a, c, g, or t
  misc_feature (802)..(802): n is a, c, g, or t
  misc_feature (860)..(860): n is a, c, g, or t
  misc_feature (875)..(875): n is a, c, g, or t
  misc_feature (893)..(893): n is a, c, g, or t
  misc_feature (905)..(905): n is a, c, g, or t
  misc_feature (931)..(931): n is a, c, g, or t
  misc_feature (944)..(945): n is a, c, g, or t
  misc_feature (948)..(948): n is a, c, g, or t
  misc_feature (983)..(983): n is a, c, g, or t
  misc_feature (990)..(990): n is a, c, g, or t
  misc_feature (992)..(992): n is a, c, g, or t
  misc_feature (1006)..(1006): n is a, c, g, or t
  misc_feature (1040)..(1040): n is a, c, g, or t
  misc_feature (1052)..(1052): n is a, c, g, or t
  misc_feature (1058)..(1058): n is a, c, g, or t
  misc_feature (1060)..(1060): n is a, c, g, or t
  misc_feature (1063)..(1063): n is a, c, g, or t
  misc_feature (1071)..(1071): n is a, c, g, or t
  misc_feature (1078)..(1078): n is a, c, g, or t
  misc_feature (1081)..(1081): n is a, c, g, or t
  misc_feature (1083)..(1083): n is a, c, g, or t
  misc_feature (1087)..(1087): n is a, c, g, or t
  misc_feature (1089)..(1089): n is a, c, g, or t
  misc_feature (1092)..(1094): n is a, c, g, or t
  misc_feature (1100)..(1100): n is a, c, g, or t
  misc_feature (1102)..(1103): n is a, c, g, or t
  misc_feature (1109)..(1110): n is a, c, g, or t
  misc_feature (1118)..(1118): n is a, c, g, or t
  misc_feature (1122)..(1122): n is a, c, g, or t
  misc_feature (1127)..(1127): n is a, c, g, or t
  misc_feature (1131)..(1131): n is a, c, g, or t
  misc_feature (1136)..(1136): n is a, c, g, or t
  misc_feature (1153)..(1156): n is a, c, g, or t
  misc_feature (1165)..(1165): n is a, c, g, or t
  misc_feature (1179)..(1179): n is a, c, g, or t
  misc_feature (1183)..(1183): n is a, c, g, or t
  misc_feature (1190)..(1190): n is a, c, g, or t
  misc_feature (1201)..(1202): n is a, c, g, or t
  misc_feature (1210)..(1211): n is a, c, g, or t
  misc_feature (1213)..(1213): n is a, c, g, or t
  misc_feature (1218)..(1219): n is a, c, g, or t
  misc_feature (1222)..(1222): n is a, c, g, or t
  misc_feature (1240)..(1241): n is a, c, g, or t
  misc_feature (1246)..(1247): n is a, c, g, or t
  misc_feature (1249)..(1249): n is a, c, g, or t
  misc_feature (1254)..(1254): n is a, c, g, or t
  misc_feature (1257)..(1258): n is a, c, g, or t
  misc_feature (1265)..(1265): n is a, c, g, or t
  misc_feature (1270)..(1270): n is a, c, g, or t
  misc_feature (1278)..(1278): n is a, c, g, or t
  misc_feature (1289)..(1289): n is a, c, g, or t
  misc_feature (1291)..(1292): n is a, c, g, or t
  misc_feature (1294)..(1294): n is a, c, g, or t
  misc_feature (1303)..(1304): n is a, c, g, or t
  misc_feature (1312)..(1312): n is a, c, g, or t
  misc_feature (1314)..(1314): n is a, c, g, or t
  misc_feature (1316)..(1316): n is a, c, g, or t
  misc_feature (1319)..(1319): n is a, c, g, or t
  misc_feature (1325)..(1326): n is a, c, g, or t
  misc_feature (1337)..(1337): n is a, c, g, or t
  misc_feature (1347)..(1347): n is a, c, g, or t
  misc_feature (1349)..(1349): n is a, c, g, or t
  misc_feature (1354)..(1356): n is a, c, g, or t
  misc_feature (1361)..(1362): n is a, c, g, or t
  misc_feature (1383)..(1383): n is a, c, g, or t
  misc_feature (1385)..(1385): n is a, c, g, or t
  misc_feature (1387)..(1387): n is a, c, g, or t
  misc_feature (1393)..(1393): n is a, c, g, or t
nttagagaaattactatgagaggatcgcatcaccatcaccatcacggatcctatttaggtgacactatagaatcgtcgacccacgcgtccgcccacgcgtccggcaagatggcgggtgaaaaagttgagaagccagatactaaagagaagaaacccgaagccaagaaggttgatgctggtggcaaggtgaaaaagggtaacctcaaagctaaaaagcccaagaaggggaagccccattgcagccgcaaccctgtccttgtcagaggaattggcaggtattcccgatctgccatgtattccagaaaggccatgtacaagaggaagtactcagccgctaaatccaaggttgaaaagaaaaagaaggagaaggttctcgcaactgttacaaaaccagttggtggtgacaagaacggcggtacccgggtggttaaacttcgcaaaatgcctagatattatcctactgaagatgtgcctcgaaagctgttgagccacggcaaaaaacccttcagtcagcacgtgagaaaactgcgagccagcattacccccgggaccattctgatcatcctcactggacgccacaggggcaagagggtggttttcctgaagcagctggctagtggcttattacttgtgactggacctctggtcctcaatcgagttcctctacgaagaacacaccagaaatttgtcattgccacttcaaccaaaaatcgatatcagcaatgtaaaaatcccaaaacatcttactgatgcttacttcagnaagaagaagctgcggaagcccanacaccaggaaggtganatcttcgacacagaaaaagagaaatatgagattacggaaccagcgcaagattgatcanaaagctgtggactcncaaatttttaccaaaatncaaagctattcntcagcctccagggctacctgcgattnggttttgctctgnnaanggaatttttcctcccaaatttggtgtttctaaatntcttaanancctatttaaatacntgactacaaaaaaaaaaaaaaaaaaaaagggccnggcccccccctnaagggngnccnattaaacnttaattnccntnaacntngannnctgttnannattccnngaaatgancccnaaacncctnctggntttttttcaaaaacctnnnntgccccccnggctctttttttangggnaaaatcnacccttcttgnnaaattttnngnccttnngantttaattggaaaaaaatnntgggnncnccccntgnntaccccnggctncaaaaaanttttgggtttntnntngtgtccggnnctaacaancntnccngtattnnctttttaaacnaaaaaaaaancnttttnnnttttnntttcccccgagatcctcgttntngnataaangtg

SEQ ID NO: 180 - DNA, 1398 bp, Homo Sapiens
  misc_feature (1)..(1): n is a, c, g, or t
  misc_feature (4)..(4): n is a, c, g, or t
  misc_feature (781)..(781): n is a, c, g, or t
  misc_feature (812)..(812): n is a, c, g, or t
  misc_feature (825)..(825): n is a, c, g, or t
  misc_feature (867)..(867): n is a, c, g, or t
  misc_feature (929)..(929): n is a, c, g, or t
  misc_feature (943)..(943): n is a, c, g, or t
  misc_feature (946)..(946): n is a, c, g, or t
  misc_feature (949)..(949): n is a, c, g, or t
  misc_feature (952)..(952): n is a, c, g, or t
  misc_feature (984)..(984): n is a, c, g, or t
  misc_feature (989)..(989): n is a, c, g, or t
  misc_feature (1005)..(1005): n is a, c, g, or t
  misc_feature (1010)..(1010): n is a, c, g, or t
  misc_feature (1012)..(1012): n is a, c, g, or t
  misc_feature (1015)..(1015): n is a, c, g, or t
  misc_feature (1030)..(1031): n is a, c, g, or t
  misc_feature (1045)..(1046): n is a, c, g, or t
  misc_feature (1054)..(1055): n is a, c, g, or t
  misc_feature (1066)..(1066): n is a, c, g, or t
  misc_feature (1069)..(1069): n is a, c, g, or t
  misc_feature (1076)..(1076): n is a, c, g, or t
  misc_feature (1079)..(1079): n is a, c, g, or t
  misc_feature (1084)..(1084): n is a, c, g, or t
  misc_feature (1090)..(1091): n is a, c, g, or t
  misc_feature (1094)..(1094): n is a, c, g, or t
  misc_feature (1098)..(1098): n is a, c, g, or t
  misc_feature (1108)..(1108): n is a, c, g, or t
  misc_feature (1118)..(1118): n is a, c, g, or t
  misc_feature (1122)..(1122): n is a, c, g, or t
  misc_feature (1124)..(1125): n is a, c, g, or t
  misc_feature (1129)..(1129): n is a, c, g, or t
  misc_feature (1133)..(1134): n is a, c, g, or t
  misc_feature (1142)..(1142): n is a, c, g, or t
  misc_feature (1144)..(1145): n is a, c, g, or t
  misc_feature (1147)..(1147): n is a, c, g, or t
  misc_feature (1154)..(1154): n is a, c, g, or t
  misc_feature (1161)..(1161): n is a, c, g, or t
  misc_feature (1170)..(1170): n is a, c, g, or t
  misc_feature (1179)..(1179): n is a, c, g, or t
  misc_feature (1194)..(1194): n is a, c, g, or t
  misc_feature (1196)..(1196): n is a, c, g, or t
  misc_feature (1200)..(1200): n is a, c, g, or t
  misc_feature (1203)..(1203): n is a, c, g, or t
  misc_feature (1210)..(1210): n is a, c, g, or t
  misc_feature (1215)..(1217): n is a, c, g, or t
  misc_feature (1219)..(1219): n is a, c, g, or t
  misc_feature (1222)..(1222): n is a, c, g, or t
  misc_feature (1224)..(1224): n is a, c, g, or t
  misc_feature (1228)..(1228): n is a, c, g, or t
  misc_feature (1230)..(1230): n is a, c, g, or t
  misc_feature (1232)..(1232): n is a, c, g, or t
  misc_feature (1238)..(1238): n is a, c, g, or t
  misc_feature (1240)..(1240): n is a, c, g, or t
  misc_feature (1245)..(1247): n is a, c, g, or t
  misc_feature (1251)..(1251): n is a, c, g, or t
  misc_feature (1255)..(1255): n is a, c, g, or t
  misc_feature (1260)..(1260): n is a, c, g, or t
  misc_feature (1267)..(1267): n is a, c, g, or t
  misc_feature (1269)..(1269): n is a, c, g, or t
  misc_feature (1273)..(1273): n is a, c, g, or t
  misc_feature (1277)..(1278): n is a, c, g, or t
  misc_feature (1287)..(1287): n is a, c, g, or t
  misc_feature (1292)..(1292): n is a, c, g, or t
  misc_feature (1295)..(1295): n is a, c, g, or t
  misc_feature (1297)..(1298): n is a, c, g, or t
  misc_feature (1300)..(1301): n is a, c, g, or t
  misc_feature (1305)..(1305): n is a, c, g, or t
  misc_feature (1312)..(1312): n is a, c, g, or t
  misc_feature (1316)..(1316): n is a, c, g, or t
  misc_feature (1320)..(1321): n is a, c, g, or t
  misc_feature (1323)..(1325): n is a, c, g, or t
  misc_feature (1332)..(1334): n is a, c, g, or t
  misc_feature (1336)..(1336): n is a, c, g, or t
  misc_feature (1339)..(1340): n is a, c, g, or t
  misc_feature (1343)..(1343): n is a, c, g, or t
  misc_feature (1345)..(1345): n is a, c, g, or t
  misc_feature (1353)..(1356): n is a, c, g, or t
  misc_feature (1362)..(1365): n is a, c, g, or t
  misc_feature (1373)..(1398): n is a, c, g, or t
ntantagagaaattactatgagaggatcgcatcaccatcaccatcacggatcctatttaggtgacactatagaatcgtcgacccacgcgtccggctcctggaggcggcgggatggaggcggcggccgagcctggaaacctggccggcgtcaggcacatcatcctggtcctctcaggaaaggggggcgttgggaaaagcaccatctccacggagctggccctggcactgcgccatgcaggcaagaaggtgggaatcctggatgtggacctgtgtggccccagtataccccgcatgctcggggcgcagggcagggctgtgcaccagtgcgaccgcggctgggcacccgtcttcctggaccgggagcagagcatctcgctcatgtctgtgggcttcctgctggagaagccggacgaggccgtggtgtggagaggccccaagaaaaacgcgctgataaagcagtttgtgtccgacgtggcctggggggagctggactacctggtggtggacacgcccccggggacctccgatgagcacatggccaccatagaagccctgcgtccctaccagcccctgggggccctcgtggtcaccacgccccaggcggtgtccgtgggggacgtgaggcgcgagctgaccttctgtaggaagacgggcttgcgggtgatgggaatcgtggagaatatgagcggcttcacctgcccacactgcacggagtgcaccagcgtcttctccaggggcggcggaaaggagctggcccagctcgccggggtgcccttcttangctccgtgcccctggaccctgcgctcatgangaccctggagganggccacgacttcatccaggagttccccggggaagccccgccnttcgctgcactcacctccatagcccaaaaaattctggaacgcgacgcccgcgtgcctccccntgactaaggccacnttncanccnctttccagggccaccaagggctctgctcccancctcncaaaaaaaaaaaagcntgggntncgnttcccgggcccttgnnaggggcaggcccanncaacgtcnnccgggaaaaanttntcccaancancccanccccannatntttnccaccaacancttttcctgnttgncnncaangccnnggtttgcntnntntcaactntaaaaangggcggccngggccctcntcccatccatgtttncnaccnggnccctggnacccnnngnccnanattnangnaccaananttttnnntctnaggnaaccnggccccnancccngggnnttttttttntttantcngnnanncccnaaggggnaaanaacnncnnnttttttnnntnaannccncnttaaattnnnnttgggnnnnaaaaaaannnnnnnnnnnnnnnnnnnnnnnnnn

SEQ ID NO: 181 - DNA, 1200 bp, Homo Sapiens
  misc_feature (135)..(135): n is a, c, g, or t
  misc_feature (139)..(139): n is a, c, g, or t
  misc_feature (167)..(167): n is a, c, g, or t
  misc_feature (200)..(200): n is a, c, g, or t
  misc_feature (280)..(280): n is a, c, g, or t
  misc_feature (379)..(379): n is a, c, g, or t
  misc_feature (424)..(424): n is a, c, g, or t
  misc_feature (640)..(640): n is a, c, g, or t
  misc_feature (671)..(671): n is a, c, g, or t
  misc_feature (731)..(731): n is a, c, g, or t
  misc_feature (751)..(751): n is a, c, g, or t
  misc_feature (753)..(753): n is a, c, g, or t
  misc_feature (837)..(837): n is a, c, g, or t
  misc_feature (839)..(839): n is a, c, g, or t
  misc_feature (849)..(849): n is a, c, g, or t
  misc_feature (853)..(853): n is a, c, g, or t
  misc_feature (855)..(855): n is a, c, g, or t
  misc_feature (865)..(865): n is a, c, g, or t
  misc_feature (875)..(876): n is a, c, g, or t
  misc_feature (884)..(885): n is a, c, g, or t
  misc_feature (889)..(889): n is a, c, g, or t
  misc_feature (901)..(901): n is a, c, g, or t
  misc_feature (913)..(913): n is a, c, g, or t
  misc_feature (918)..(918): n is a, c, g, or t
  misc_feature (933)..(933): n is a, c, g, or t
  misc_feature (955)..(955): n is a, c, g, or t
  misc_feature (966)..(966): n is a, c, g, or t
  misc_feature (970)..(970): n is a, c, g, or t
  misc_feature (981)..(981): n is a, c, g, or t
  misc_feature (985)..(985): n is a, c, g, or t
  misc_feature (1003)..(1004): n is a, c, g, or t
  misc_feature (1014)..(1014): n is a, c, g, or t
  misc_feature (1018)..(1018): n is a, c, g, or t
  misc_feature (1021)..(1021): n is a, c, g, or t
  misc_feature (1024)..(1024): n is a, c, g, or t
  misc_feature (1030)..(1032): n is a, c, g, or t
  misc_feature (1079)..(1081): n is a, c, g, or t
  misc_feature (1089)..(1089): n is a, c, g, or t
  misc_feature (1092)..(1092): n is a, c, g, or t
  misc_feature (1096)..(1097): n is a, c, g, or t
  misc_feature (1099)..(1099): n is a, c, g, or t
  misc_feature (1101)..(1101): n is a, c, g, or t
  misc_feature (1103)..(1104): n is a, c, g, or t
  misc_feature (1108)..(1108): n is a, c, g, or t
  misc_feature (1113)..(1118): n is a, c, g, or t
  misc_feature (1121)..(1124): n is a, c, g, or t
  misc_feature (1131)..(1131): n is a, c, g, or t
  misc_feature (1133)..(1133): n is a, c, g, or t
  misc_feature (1137)..(1137): n is a, c, g, or t
  misc_feature (1147)..(1147): n is a, c, g, or t
  misc_feature (1149)..(1149): n is a, c, g, or t
  misc_feature (1156)..(1156): n is a, c, g, or t
  misc_feature (1164)..(1164): n is a, c, g, or t
  misc_feature (1168)..(1168): n is a, c, g, or t
  misc_feature (1170)..(1170): n is a, c, g, or t
  misc_feature (1179)..(1179): n is a, c, g, or t
  misc_feature (1187)..(1187): n is a, c, g, or t
  misc_feature (1196)..(1197): n is a, c, g, or t
tagagaaattactatgagaggatcgcatcaccatcaccatcacgggatcctatttaggtgacactatagaatcgtcgacccacgcgtccggtcggggaaaccagcacgatgtgccagtcattcctttggatgtanctancataatcagacagagaagttggacaccnacataactgaggtggatgcagcctccgtttacncgctgcctgctggagctgacttcctcatgtgttactctgttgcagaaggatattattctcaccgggaaactgtgaacggntcatggtacattcaagatttgtgtgagatgttgggaaaatatggctcctccttaaagttcacagaactcctcacactggtgaacaggaaagtttctcancgccgagtggacttttgcaaagacccaagtgcaattggaaagaancaggttccctgttttgcctcaatgctaactaaaaagctgcatttctttccaaaatctaattaattaatagaggctatctaattttacactctgtattgaaaatggctttctcagccaggcgtggttactcacacctgtaatcccagcactttgggagtccaaggtgggcggatcacctgaggtcgggagttcgagaccagcctgaccaacatgganaagccccgtctctactaaaaatgcaaaaaanaatttagctaggcatggcggcgcatgcctgcaatcccagctacttggaaggctgaggcangagaatcacttgaacccagnangtggaggctgcggtgagccgagattgcgccattgcactccagcctgggcaacgagtgaaactccgtctcaaaaaaaaaaaatgncnttctcttccnttanantaaatatcgntagggtgaanncattatgnnctantgattcaaatgnttttaaagttantgccnaccaaaaaactgccnttaaaaaaaaaaaaaaaatttncctgttggccntggngaaaggggttngaantggaaaaaccaaaatccnncggaaatttnaaanaanaanaatttnnnaaccattttgtatttatttttttaaaaaaccggccgggggttccccnnnaaaaaaanagncccnncnananntttnaaaannnnnntannnngggggcngncccnccccaagggnancccaatnaacctttnttancngacctgganccccggtnaaaattccnnaag

SEQ ID NO: 182 - DNA, 1383 bp, Homo Sapiens
  misc_feature (862)..(862): n is a, c, g, or t
  misc_feature (877)..(877): n is a, c, g, or t
  misc_feature (944)..(944): n is a, c, g, or t
  misc_feature (948)..(948): n is a, c, g, or t
  misc_feature (1007)..(1007): n is a, c, g, or t
  misc_feature (1009)..(1009): n is a, c, g, or t
  misc_feature (1020)..(1020): n is a, c, g, or t
  misc_feature (1028)..(1029): n is a, c, g, or t
  misc_feature (1031)..(1031): n is a, c, g, or t
  misc_feature (1035)..(1035): n is a, c, g, or t
  misc_feature (1038)..(1038): n is a, c, g, or t
  misc_feature (1045)..(1045): n is a, c, g, or t
  misc_feature (1057)..(1057): n is a, c, g, or t
  misc_feature (1061)..(1061): n is a, c, g, or t
  misc_feature (1071)..(1072): n is a, c, g, or t
  misc_feature (1079)..(1079): n is a, c, g, or t
  misc_feature (1100)..(1100): n is a, c, g, or t
  misc_feature (1115)..(1115): n is a, c, g, or t
  misc_feature (1121)..(1122): n is a, c, g, or t
  misc_feature (1127)..(1127): n is a, c, g, or t
  misc_feature (1137)..(1137): n is a, c, g, or t
  misc_feature (1151)..(1152): n is a, c, g, or t
  misc_feature (1155)..(1155): n is a, c, g, or t
  misc_feature (1158)..(1158): n is a, c, g, or t
  misc_feature (1171)..(1172): n is a, c, g, or t
  misc_feature (1187)..(1187): n is a, c, g, or t
  misc_feature (1191)..(1191): n is a, c, g, or t
  misc_feature (1198)..(1198): n is a, c, g, or t
  misc_feature (1200)..(1200): n is a, c, g, or t
  misc_feature (1202)..(1203): n is a, c, g, or t
  misc_feature (1212)..(1212): n is a, c, g, or t
  misc_feature (1233)..(1233): n is a, c, g, or t
  misc_feature (1242)..(1242): n is a, c, g, or t
  misc_feature (1244)..(1244): n is a, c, g, or t
  misc_feature (1246)..(1246): n is a, c, g, or t
  misc_feature (1248)..(1248): n is a, c, g, or t
  misc_feature (1255)..(1255): n is a, c, g, or t
  misc_feature (1257)..(1257): n is a, c, g, or t
  misc_feature (1267)..(1268): n is a, c, g, or t
  misc_feature (1271)..(1271): n is a, c, g, or t
  misc_feature (1275)..(1275): n is a, c, g, or t
  misc_feature (1299)..(1299): n is a, c, g, or t
  misc_feature (1328)..(1328): n is a, c, g, or t
  misc_feature (1335)..(1335): n is a, c, g, or t
  misc_feature (1338)..(1338): n is a, c, g, or t
  misc_feature (1340)..(1340): n is a, c, g, or t
  misc_feature (1351)..(1351): n is a, c, g, or t
  misc_feature (1355)..(1355): n is a, c, g, or t
  misc_feature (1361)..(1362): n is a, c, g, or t
  misc_feature (1381)..(1382): n is a, c, g, or t
atagagaaattactatgagaggatcgcatcaccatcaccatcacggatcctatttaggtgacactatagaatcgtcgacccacgcgtccgaccaagcgctccaggggctttgggtttgtcacatatgccactgtggaggaggtggatgcagctatgaatgcaaggccacacaaggtggatggaagagttgtggaaccaaagagagctgtctccagagaagattctcaaagaccaggtgcccacttaactgtgaaaaagatatttgttggtggcattaaagaagacactgaagaacatcacctaagagattattttgaacagtatggaaaaattgaagtgattgaaatcatgactgaccgaggcagtggcaagaaaaggggctttgcctttgtaacctttgacgaccatgactccgtggataagattgtcattcagaaataccatactgtgaatggccacaactgtgaagttagaaaagccctgtcaaagcaagagatggctagtgcttcatccagccaaagaggtcgaagtggttctggaaactttggtggtggtcgtggaggtggtttcggtgggaatgacaacttcggtcgtggaggaaacttcagtggtcgtggtggctttggtggcagccgtggtggtggtggatatggtggcagtggggatggctataatggatttggtaatgatggtggttatggaggaggcggccctggttactctggaggaagcagaggctatggaagtggtggacagggttatggaaaccagggcagtggctatggcgggagtggcagctatgacagctataacaacggaggcggaggcggctttggcggtggtagtggaagcaattttggangtggtggaagctacnatgattttgggaattacaacaatcagtcttcaaattttggacccatgaagggaggaaatttttggangcanaagctctggcccctatggcggtggaaggccaatactttgcaaacccccaaaaccaaggngnctatggcggtnccgccacnncnatanctntggcatngcaaaaaatttnattnggaaaccaanncttaccnggaaaggaaaaccccaaaaantgccagggaaacctnccggtnncaccnatttttgacnccccccaaccccannggnggncaggccccaaccnnctccaaaaaaaactntttnaaaaaancncnnttggttggnccaaaaaaccccgggaccgtnttttggccnantntnaaacagntnttttttttcnnttntggnaaaggtaaacccttccccaagggntttagggaattttttttttccccccggtntttttcnaantnacccccccccncccnaaaaanncttttttagggcgggaaannc

SEQ ID NO: 183 - DNA, 1200 bp, Homo Sapiens
  misc_feature (1)..(1): n is a, c, g, or t
  misc_feature (309)..(309): n is a, c, g, or t
  misc_feature (789)..(789): n is a, c, g, or t
  misc_feature (798)..(798): n is a, c, g, or t
  misc_feature (832)..(832): n is a, c, g, or t
  misc_feature (847)..(847): n is a, c, g, or t
  misc_feature (863)..(863): n is a, c, g, or t
  misc_feature (877)..(877): n is a, c, g, or t
  misc_feature (909)..(909): n is a, c, g, or t
  misc_feature (916)..(916): n is a, c, g, or t
  misc_feature (921)..(921): n is a, c, g, or t
  misc_feature (927)..(927): n is a, c, g, or t
  misc_feature (929)..(929): n is a, c, g, or t
  misc_feature (950)..(951): n is a, c, g, or t
  misc_feature (969)..(969): n is a, c, g, or t
  misc_feature (981)..(981): n is a, c, g, or t
  misc_feature (994)..(994): n is a, c, g, or t
  misc_feature (997)..(997): n is a, c, g, or t
  misc_feature (1007)..(1008): n is a, c, g, or t
  misc_feature (1021)..(1021): n is a, c, g, or t
  misc_feature (1023)..(1024): n is a, c, g, or t
  misc_feature (1028)..(1028): n is a, c, g, or t
  misc_feature (1050)..(1050): n is a, c, g, or t
  misc_feature (1052)..(1053): n is a, c, g, or t
  misc_feature (1064)..(1064): n is a, c, g, or t
  misc_feature (1066)..(1066): n is a, c, g, or t
  misc_feature (1070)..(1070): n is a, c, g, or t
  misc_feature (1072)..(1072): n is a, c, g, or t
  misc_feature (1076)..(1076): n is a, c, g, or t
  misc_feature (1084)..(1084): n is a, c, g, or t
  misc_feature (1090)..(1090): n is a, c, g, or t
  misc_feature (1093)..(1093): n is a, c, g, or t
  misc_feature (1098)..(1098): n is a, c, g, or t
  misc_feature (1103)..(1103): n is a, c, g, or t
  misc_feature (1105)..(1105): n is a, c, g, or t
  misc_feature (1113)..(1113): n is a, c, g, or t
  misc_feature (1124)..(1124): n is a, c, g, or t
  misc_feature (1129)..(1129): n is a, c, g, or t
  misc_feature (1138)..(1140): n is a, c, g, or t
  misc_feature (1165)..(1165): n is a, c, g, or t
  misc_feature (1169)..(1169): n is a, c, g, or t
  misc_feature (1171)..(1172): n is a, c, g, or t
  misc_feature (1175)..(1176): n is a, c, g, or t
  misc_feature (1180)..(1181): n is a, c, g, or t
  misc_feature (1184)..(1184): n is a, c, g, or t
  misc_feature (1190)..(1190): n is a, c, g, or t
  misc_feature (1195)..(1195): n is a, c, g, or t
naattagagaaattactatgagaggatcgcatcaccatcaccatcacggatcctatttaggtgacactatagaatcgtcgacccacgcgtccgctttgccatcccctcgagaagtgactgttacagaacggctcctcctggatggcccaccacctcattcaccagagactcctcaatttccccccacaactggagctgtactgtacactgttaagagaaaccaggttgggcctgaggttcgctcctgccccaaggcatcccccagacttcagaaagagagggagggccaaaaggcagtgagtgagtcanaggctttgatgctggtctgggatgcatcagaaactgagaaattgcctggtaccgtggaaccccctgcttccttcctgagtcctgtttcctcaaagaccagagatgcagggagaagacatgtgtccgggaaaccagacactcaagagagatggctgccctcaagcagagctcgggtgaagacaagagacaggacgtgccctgtccatgaatctccatcaggaattgacacctcagagacttctcccaaagcccctagagggggtttggctaaagacagtggaacacaggccaagggtccagagggggagcagcagccaaaggccgcagaagctacggtgtgtgccaacaacagcaaggtcagctccactggggaaaaggttgtcctgtggacaaggtaggtaagggtggatgacgtgtgtttggaaaaagagcatagaccacatccatgtggctccctagggttaatcatgatacctgggnttacagggnaagctgaccgtgtgatcctcaccatgtgccaagnacaagggggcacagnccacagaaccttcaanatcatcttcccaancagctgggaaaataaaaaccccttgctgaggntttcccnaccgnttttcnanaaactcatgcaactctttccnnactggcctgggaaacccngctctgaagganggaaggatgatgncancccattaccnncaatggcaaaccnanntgtntggaccatgggggacctttttntnntaaaaaaaaancnggantnaaangaaaattnttgggnaantcttnttaancngggaaccnaaaccccaaanggggncccctgggnnnccgggggaaggggggaaattttaancccngnnttnnaaannccnttgganccccnttttt

SEQ ID NO: 184 - DNA, 1363 bp, Homo Sapiens
  misc_feature (759)..(759): n is a, c, g, or t
  misc_feature (853)..(853): n is a, c, g, or t
  misc_feature (863)..(863): n is a, c, g, or t
  misc_feature (875)..(875): n is a, c, g, or t
  misc_feature (878)..(878): n is a, c, g, or t
  misc_feature (887)..(887): n is a, c, g, or t
  misc_feature (900)..(900): n is a, c, g, or t
  misc_feature (907)..(907): n is a, c, g, or t
  misc_feature (909)..(909): n is a, c, g, or t
  misc_feature (919)..(919): n is a, c, g, or t
  misc_feature (931)..(931): n is a, c, g, or t
  misc_feature (937)..(937): n is a, c, g, or t
  misc_feature (943)..(943): n is a, c, g, or t
  misc_feature (946)..(946): n is a, c, g, or t
  misc_feature (968)..(968): n is a, c, g, or t
  misc_feature (971)..(971): n is a, c, g, or t
  misc_feature (975)..(975): n is a, c, g, or t
  misc_feature (981)..(981): n is a, c, g, or t
  misc_feature (983)..(983): n is a, c, g, or t
  misc_feature (991)..(991): n is a, c, g, or t
  misc_feature (1006)..(1006): n is a, c, g, or t
  misc_feature (1012)..(1012): n is a, c, g, or t
  misc_feature (1017)..(1018): n is a, c, g, or t
  misc_feature (1024)..(1025): n is a, c, g, or t
  misc_feature (1027)..(1027): n is a, c, g, or t
  misc_feature (1030)..(1030): n is a, c, g, or t
  misc_feature (1034)..(1034): n is a, c, g, or t
  misc_feature (1036)..(1036): n is a, c, g, or t
  misc_feature (1045)..(1045): n is a, c, g, or t
  misc_feature (1050)..(1050): n is a, c, g, or t
  misc_feature (1052)..(1052): n is a, c, g, or t
  misc_feature (1055)..(1055): n is a, c, g, or t
  misc_feature (1057)..(1057): n is a, c, g, or t
  misc_feature (1063)..(1063): n is a, c, g, or t
  misc_feature (1067)..(1068): n is a, c, g, or t
  misc_feature (1076)..(1077): n is a, c, g, or t
  misc_feature (1079)..(1080): n is a, c, g, or t
  misc_feature (1087)..(1087): n is a, c, g, or t
  misc_feature (1093)..(1093): n is a, c, g, or t
  misc_feature (1095)..(1095): n is a, c, g, or t
  misc_feature (1100)..(1100): n is a, c, g, or t
  misc_feature (1110)..(1112): n is a, c, g, or t
  misc_feature (1114)..(1116): n is a, c, g, or t
  misc_feature (1125)..(1125): n is a, c, g, or t
  misc_feature (1132)..(1132): n is a, c, g, or t
  misc_feature (1143)..(1143): n is a, c, g, or t
  misc_feature (1145)..(1145): n is a, c, g, or t
  misc_feature (1148)..(1149): n is a, c, g, or t
  misc_feature (1151)..(1151): n is a, c, g, or t
  misc_feature (1155)..(1155): n is a, c, g, or t
  misc_feature (1169)..(1170): n is a, c, g, or t
  misc_feature (1177)..(1177): n is a, c, g, or t
  misc_feature (1180)..(1180): n is a, c, g, or t
  misc_feature (1184)..(1184): n is a, c, g, or t
  misc_feature (1187)..(1188): n is a, c, g, or t
  misc_feature (1191)..(1191): n is a, c, g, or t
  misc_feature (1193)..(1194): n is a, c, g, or t
  misc_feature (1200)..(1200): n is a, c, g, or t
  misc_feature (1202)..(1203): n is a, c, g, or t
  misc_feature (1205)..(1205): n is a, c, g, or t
  misc_feature (1215)..(1215): n is a, c, g, or t
  misc_feature (1219)..(1219): n is a, c, g, or t
  misc_feature (1225)..(1226): n is a, c, g, or t
  misc_feature (1229)..(1229): n is a, c, g, or t
  misc_feature (1231)..(1232): n is a, c, g, or t
  misc_feature (1236)..(1236): n is a, c, g, or t
  misc_feature (1240)..(1241): n is a, c, g, or t
  misc_feature (1243)..(1243): n is a, c, g, or t
  misc_feature (1247)..(1248): n is a, c, g, or t
  misc_feature (1251)..(1252): n is a, c, g, or t
  misc_feature (1256)..(1256): n is a, c, g, or t
  misc_feature (1260)..(1260): n is a, c, g, or t
  misc_feature (1264)..(1265): n is a, c, g, or t
  misc_feature (1267)..(1268): n is a, c, g, or t
  misc_feature (1272)..(1273): n is a, c, g, or t
  misc_feature (1283)..(1283): n is a, c, g, or t
  misc_feature (1285)..(1285): n is a, c, g, or t
  misc_feature (1288)..(1291): n is a, c, g, or t
  misc_feature (1297)..(1297): n is a, c, g, or t
  misc_feature (1303)..(1303): n is a, c, g, or t
  misc_feature (1305)..(1305): n is a, c, g, or t
  misc_feature (1307)..(1308): n is a, c, g, or t
  misc_feature (1310)..(1311): n is a, c, g, or t
  misc_feature (1314)..(1314): n is a, c, g, or t
  misc_feature (1316)..(1323): n is a, c, g, or t
  misc_feature (1325)..(1325): n is a, c, g, or t
  misc_feature (1329)..(1329): n is a, c, g, or t
  misc_feature (1336)..(1346): n is a, c, g, or t
  misc_feature (1358)..(1361): n is a, c, g, or t
  misc_feature (1363)..(1363): n is a, c, g, or t
aatagagaaattactatgagaggatcgcatcaccatcaccatcacggatcctatttaggtgacactatagaatcgtcgacccacgcgtccgccggctgcctagccctccccccagctccctgcaccgccgcagaagcagcccctcgaggcctacagaggaggcctcaaagcaacccgctggagcccacagcgagcctgtgccttcctccccgcctcctcccactgggactcccagcagagcccaccagccagccctggcccaccccccagcctccagagaagccccgcacgggctgtctgggtgtccgccatccagggtctggcagagcctctgagatgatgcatgatgccctcccctcagcgcaggctgcagagcccggccccacctccctgcgcccttgaggggccccagcgtctgcagggtgacgcctgagacagcaccactgctgaggagtctgaggactgtcctcccacagacctgcagtgaggggccctccatgcgcagatgaggggccactgacccacctgcgcttctgctggaggaggggaagctgggcccaaaggcccagggaggcagcgtgggctctgccaatgtgggctgcccctcgcacacagggctcacagggcaggccttgctggggtccagggctgttggaggaccccgagggctgaggagcagccaggacccgcctgctcccatcctcacccagatcaggaaccagggcctccctgttcacggtgacacaggtcagggctcanagtgaccctcggctgtcacctgctcacagggatgctggtggctggtgagaccccgcactgcacacgggaatgcctaggtcccttcccgacccanccagctgcanggcaggggaacntgnatagttaanggctttttccaanatgcatncnatttactganacttccttgtcnttgttnatgganagntgtttcgctcctcccaaatggnttngganggcccncnagggcccnaccttggaacctggngaactnctggnnattcanngnagncatnangggccttgncccangnctngnaagggncctnntttccttnntnngcccaanttgcangnggccntgggaaaggnnntnnnttttttttnaaagggntcttgaggggnanaannanttgnaaggttttgggggnnatttttnttnaacnaannaancnnagaaangnncnttaagggggntttntttttnnccncnncccnaaanngnaaannagnncccngttngggnngnncccnnggtttttttngnaannnnatttantttttngnannannccnannnnnnnntncccnaaaaaannnnnnnnnnngggggtggattnnnnan

SEQ ID NO: 185 - DNA, 1347 bp, Homo Sapiens
  misc_feature (433)..(433): n is a, c, g, or t
  misc_feature (462)..(462): n is a, c, g, or t
  misc_feature (493)..(493): n is a, c, g, or t
  misc_feature (592)..(592): n is a, c, g, or t
  misc_feature (863)..(863): n is a, c, g, or t
  misc_feature (872)..(872): n is a, c, g, or t
  misc_feature (896)..(896): n is a, c, g, or t
  misc_feature (914)..(914): n is a, c, g, or t
  misc_feature (945)..(945): n is a, c, g, or t
  misc_feature (948)..(948): n is a, c, g, or t
  misc_feature (955)..(955): n is a, c, g, or t
  misc_feature (982)..(982): n is a, c, g, or t
  misc_feature (986)..(986): n is a, c, g, or t
  misc_feature (1004)..(1004): n is a, c, g, or t
  misc_feature (1012)..(1012): n is a, c, g, or t
  misc_feature (1018)..(1018): n is a, c, g, or t
  misc_feature (1022)..(1022): n is a, c, g, or t
  misc_feature (1062)..(1062): n is a, c, g, or t
  misc_feature (1067)..(1067): n is a, c, g, or t
  misc_feature (1072)..(1072): n is a, c, g, or t
  misc_feature (1074)..(1074): n is a, c, g, or t
  misc_feature (1076)..(1076): n is a, c, g, or t
  misc_feature (1080)..(1080): n is a, c, g, or t
  misc_feature (1083)..(1083): n is a, c, g, or t
  misc_feature (1085)..(1086): n is a, c, g, or t
  misc_feature (1099)..(1100): n is a, c, g, or t
  misc_feature (1102)..(1102): n is a, c, g, or t
  misc_feature (1127)..(1127): n is a, c, g, or t
  misc_feature (1130)..(1130): n is a, c, g, or t
  misc_feature (1142)..(1142): n is a, c, g, or t
  misc_feature (1145)..(1145): n is a, c, g, or t
  misc_feature (1167)..(1167): n is a, c, g, or t
  misc_feature (1171)..(1172): n is a, c, g, or t
  misc_feature (1176)..(1177): n is a, c, g, or t
  misc_feature (1181)..(1181): n is a, c, g, or t
  misc_feature (1185)..(1185): n is a, c, g, or t
  misc_feature (1187)..(1187): n is a, c, g, or t
  misc_feature (1245)..(1245): n is a, c, g, or t
  misc_feature (1247)..(1248): n is a, c, g, or t
  misc_feature (1255)..(1255): n is a, c, g, or t
  misc_feature (1267)..(1269): n is a, c, g, or t
  misc_feature (1283)..(1283): n is a, c, g, or t
  misc_feature (1292)..(1295): n is a, c, g, or t
  misc_feature (1300)..(1300): n is a, c, g, or t
  misc_feature (1315)..(1315): n is a, c, g, or t
  misc_feature (1325)..(1325): n is a, c, g, or t
  misc_feature (1341)..(1341): n is a, c, g, or t
  misc_feature (1345)..(1346): n is a, c, g, or t
gagaaattaactatgagaggatcgcatcaccatcaccatcacggatcctatttaggtgacactatagaatcgtcgacccacgcgtccgcggcctcagagcgcgctgtgtgtgtgtgtgtgtgtgtcagcctcagagcgcgcgctgtgtgtgtgtgtgtgtgtgtgtgtgtgtgtgcgtgcttgtgaccctgtattgtttgataggatccattcagtttccccaagtacctgttttcattcccatttttcccattgtttaaaaccatcacttttttgtctttgggaaaccacaggaacaatttctctggagacaaggctgtgtctctctcctggtcatttttgttccagcctcttcagactgtgcaatctttcagcaggaactccctctcttctcggtagctttgaatcttaagcttctacgggagagtggtanaactggatcatttcctaatcccatttagntgtgcttttcttcatttacttcataccccangaccccttccccagcagcagagaccctggagcacaggagagtagggaggaggggttctgggtccatcactgccctacatgtgactatgtccaagttaancccccaacacgagaggaaagctgctgactcccagctatagccatgggcacttggccccctgcttttcctgctcagcagagcccctcccttcagagattacgggtacttgcactggggaggtggctgctggctggcccaagcagagagctgaggcatccaagaaatgttccattggggggtgggggtgccaggtgaggtggaacattccttgtattctggcagcactgaagagccactgaagggggtaggggcagtgtaggtcctggggcancccctttantcctttatgccccttctcccccanagcctatttctaaagtcnccttttctgtcaaataaacctcaaaactttnaantttattngagaatttttttttgcttttaaaaggnggantgaaaaaaaatttgaatngactttanaataangcanaaaaaatttatattttatccaaaaaactggcccctgaaanaaaantttgntntnaaanaantnnaaactgttaaaanntnggggggccctgcttttttccccccnggnaaattttccccnggnaaaaaaaggggccaaaaaaaantttnntttnnaaangggnanggggaaaaaaaaaattgggaaggggaagggggggaaaaaaaaccccccgggggccccngnnttggggntccccccccaannncattttttttcaangaaaaaaannnnttaanggggggggggggggncccacccccnttaaaaaaaggggggngggnng

SEQ ID NO: 186 - DNA, 1289 bp, Homo Sapiens
  misc_feature (1)..(1): n is a, c, g, or t
  misc_feature (3)..(3): n is a, c, g, or t
  misc_feature (826)..(826): n is a, c, g, or t
  misc_feature (851)..(851): n is a, c, g, or t
  misc_feature (867)..(867): n is a, c, g, or t
  misc_feature (908)..(908): n is a, c, g, or t
  misc_feature (952)..(952): n is a, c, g, or t
  misc_feature (968)..(968): n is a, c, g, or t
  misc_feature (970)..(970): n is a, c, g, or t
  misc_feature (985)..(985): n is a, c, g, or t
  misc_feature (987)..(987): n is a, c, g, or t
  misc_feature (992)..(992): n is a, c, g, or t
  misc_feature (1009)..(1009): n is a, c, g, or t
  misc_feature (1017)..(1017): n is a, c, g, or t
  misc_feature (1048)..(1048): n is a, c, g, or t
  misc_feature (1053)..(1053): n is a, c, g, or t
  misc_feature (1069)..(1069): n is a, c, g, or t
  misc_feature (1082)..(1082): n is a, c, g, or t
  misc_feature (1094)..(1094): n is a, c, g, or t
  misc_feature (1096)..(1096): n is a, c, g, or t
  misc_feature (1098)..(1098): n is a, c, g, or t
  misc_feature (1100)..(1100): n is a, c, g, or t
  misc_feature (1124)..(1124): n is a, c, g, or t
  misc_feature (1127)..(1127): n is a, c, g, or t
  misc_feature (1141)..(1141): n is a, c, g, or t
  misc_feature (1144)..(1144): n is a, c, g, or t
  misc_feature (1146)..(1146): n is a, c, g, or t
  misc_feature (1148)..(1148): n is a, c, g, or t
  misc_feature (1153)..(1154): n is a, c, g, or t
  misc_feature (1162)..(1162): n is a, c, g, or t
  misc_feature (1171)..(1171): n is a, c, g, or t
  misc_feature (1176)..(1177): n is a, c, g, or t
  misc_feature (1186)..(1186): n is a, c, g, or t
  misc_feature (1194)..(1194): n is a, c, g, or t
  misc_feature (1198)..(1199): n is a, c, g, or t
  misc_feature (1206)..(1206): n is a, c, g, or t
  misc_feature (1209)..(1209): n is a, c, g, or t
  misc_feature (1213)..(1213): n is a, c, g, or t
  misc_feature (1221)..(1221): n is a, c, g, or t
  misc_feature (1223)..(1223): n is a, c, g, or t
  misc_feature (1234)..(1234): n is a, c, g, or t
  misc_feature (1236)..(1236): n is a, c, g, or t
  misc_feature (1244)..(1244): n is a, c, g, or t
  misc_feature (1255)..(1256): n is a, c, g, or t
  misc_feature (1258)..(1258): n is a, c, g, or t
  misc_feature (1266)..(1266): n is a, c, g, or t
  misc_feature (1272)..(1273): n is a, c, g, or t
  misc_feature (1277)..(1277): n is a, c, g, or t
nantagagaaattactatgagaggatcgcatcaccatcaccatcacggatcctatttaggtgacactatagaatcgtcgacccacgcgtccgaagaaaaccagcgcaaggaatcctctagttttaagactgaagatggaaaaagtattttatctgccttagacaaaggctctacacatactgcatgctcaggacccatagatgaactattagacatgaaatctgaggaaggtgcttgcctgggaccagtggcagggaccccggaacctgaaggtgctgacaaagatgacctgctgctgttgagtgagatcttcaatgcttcctccttggaagagggcgagttcagcaaagagtgggccgctgtgtttggagacggccaagtgaaggagccagtgcccactatggccctgggagagccagaccccaaggcccagacaggctcaggtttccttccttcgcagcttttagaccaaaatatgaaagacttacaggcctcgctacaagaacctgctaaggctgcctcagacctgactgcctggttcagcctcttcgctgacctcgacccactctcaaatcctgatgctgttgggaaaaccgataaagaacacgaattgctcaatgcatgaatctgtacccttcgggagggcactcacatgccgcccccagcagctcccctgggggctagcagaagtataaagtgatcagtatgctgttttaataattatgtgccattttaataaaatgaaagggtcaacggccctgtttatattggtataattatttactcttatttggtataaaagggttttcgtgtatctctatgtggnatctaaataatacaggattgtctanaagcggttttccaggnccaccgctctcctgcctacatcccatcatggctgctgcggnggtcactggggctacccgtgagatccaagtttgaaatccaaaancctactttgatggtangntttgaaatgacggtntnctaanagccctccaaaaggccngcagggangcctaaccaaaagcttttaaattggccttcnttttnttgccccccaaccctntgttccccctttnggaagaagggcntntnanggaaaaatttccctttttctggcnaangcccacctttccanggnancncctgnnataaaaantcttggccnaaccnnaaaaaattngtcccccnacannaaggggnccngggngggccccncngttttcccccncngggggaangaaatggggtnntntcctcccnggggcnnaaancctttatttttg

SEQ ID NO: 187 - DNA, 1334 bp, Homo Sapiens
  misc_feature (2)..(2): n is a, c, g, or t
  misc_feature (763)..(763): n is a, c, g, or t
  misc_feature (827)..(827): n is a, c, g, or t
  misc_feature (829)..(829): n is a, c, g, or t
  misc_feature (860)..(860): n is a, c, g, or t
  misc_feature (874)..(874): n is a, c, g, or t
  misc_feature (944)..(944): n is a, c, g, or t
  misc_feature (950)..(950): n is a, c, g, or t
  misc_feature (973)..(973): n is a, c, g, or t
  misc_feature (985)..(985): n is a, c, g, or t
  misc_feature (994)..(994): n is a, c, g, or t
  misc_feature (1001)..(1002): n is a, c, g, or t
  misc_feature (1006)..(1006): n is a, c, g, or t
  misc_feature (1009)..(1009): n is a, c, g, or t
  misc_feature (1011)..(1011): n is a, c, g, or t
  misc_feature (1016)..(1016): n is a, c, g, or t
  misc_feature (1037)..(1037): n is a, c, g, or t
  misc_feature (1056)..(1056): n is a, c, g, or t
  misc_feature (1060)..(1060): n is a, c, g, or t
  misc_feature (1065)..(1065): n is a, c, g, or t
  misc_feature (1070)..(1070): n is a, c, g, or t
  misc_feature (1073)..(1073): n is a, c, g, or t
  misc_feature (1076)..(1076): n is a, c, g, or t
  misc_feature (1080)..(1080): n is a, c, g, or t
  misc_feature (1098)..(1100): n is a, c, g, or t
  misc_feature (1103)..(1103): n is a, c, g, or t
  misc_feature (1105)..(1105): n is a, c, g, or t
  misc_feature (1107)..(1107): n is a, c, g, or t
  misc_feature (1109)..(1109): n is a, c, g, or t
  misc_feature (1112)..(1113): n is a, c, g, or t
  misc_feature (1128)..(1128): n is a, c, g, or t
  misc_feature (1130)..(1130): n is a, c, g, or t
  misc_feature (1136)..(1136): n is a, c, g, or t
  misc_feature (1139)..(1139): n is a, c, g, or t
  misc_feature (1141)..(1142): n is a, c, g, or t
  misc_feature (1144)..(1144): n is a, c, g, or t
  misc_feature (1153)..(1153): n is a, c, g, or t
  misc_feature (1155)..(1155): n is a, c, g, or t
  misc_feature (1162)..(1162): n is a, c, g, or t
  misc_feature (1169)..(1169): n is a, c, g, or t
  misc_feature (1189)..(1189): n is a, c, g, or t
  misc_feature (1197)..(1197): n is a, c, g, or t
  misc_feature (1200)..(1200): n is a, c, g, or t
  misc_feature (1205)..(1205): n is a, c, g, or t
  misc_feature (1207)..(1208): n is a, c, g, or t
  misc_feature (1213)..(1213): n is a, c, g, or t
  misc_feature (1216)..(1216): n is a, c, g, or t
  misc_feature (1222)..(1223): n is a, c, g, or t
  misc_feature (1229)..(1230): n is a, c, g, or t
  misc_feature (1232)..(1233): n is a, c, g, or t
  misc_feature (1235)..(1236): n is a, c, g, or t
  misc_feature (1243)..(1243): n is a, c, g, or t
  misc_feature (1246)..(1246): n is a, c, g, or t
  misc_feature (1248)..(1248): n is a, c, g, or t
  misc_feature (1257)..(1260): n is a, c, g, or t
  misc_feature (1262)..(1264): n is a, c, g, or t
  misc_feature (1266)..(1266): n is a, c, g, or t
  misc_feature (1270)..(1271): n is a, c, g, or t
  misc_feature (1276)..(1276): n is a, c, g, or t
  misc_feature (1279)..(1279): n is a, c, g, or t
  misc_feature (1288)..(1288): n is a, c, g, or t
  misc_feature (1290)..(1290): n is a, c, g, or t
  misc_feature (1295)..(1295): n is a, c, g, or t
  misc_feature (1297)..(1297): n is a, c, g, or t
  misc_feature (1309)..(1309): n is a, c, g, or t
  misc_feature (1316)..(1320): n is a, c, g, or t
  misc_feature (1328)..(1328): n is a, c, g, or t
  misc_feature (1332)..(1332): n is a, c, g, or t
  misc_feature (1334)..(1334): n is a, c, g, or t
antagagaaattactatgagaggatcgcatcaccatcaccatcacggatcctatttaggtgacactatagaatcgtcgacccacgcgtccggccgccctcgccatggccgcgccggccccgggcctcatctcggtgttctcgagttcccaggagctgggtgcggcgctagcgcagctggtggcccagcgcgcagcatgctgcctggcaggggcccgcgcccgtttcgcgctcggcttgtcgggcgggagcctcgtctcgatgctagcccgcgagctacccgccgccgtcgcccctgccgggccagctagcttagcgcgctggacgctgggcttctgcgacgagcgcctcgtgcccttcgatcacgccgagagcacgtacggcctctaccggacgcatcttctctccagactgccgatcccagaaagccaggtgatcaccattaaccccgagctgcctgtggaggaggcggctgaggactacgccaagaagctgagacaggcattccaaggggactccatcccggttttcgacctgctgatcctgggggtgggccccgatggtcacacctgctcactcttcccagaccaccccctcctacaggagcgggagaagattgtggctcccatcagtgactccccgaagccaccgccacagcgtgtgaccctcacgctacctgtcctgaatgcagcacgaactgtcatctttgtggcaactggagaaggcaaggcagctgttctgaagcgcattttggaggaccaggangaaaacccgctgcccgccgccctggtccagccccacaccgggaaactgtgctggttcttggacnangcggccgctccctatagtgagtcgtattaancttaattaactgancttggactcctgttgataaatccagtaatgacctcaaaactccatctggatttgttcaaaaacgctcggnttgccnccgggcgtttttttattggtganaatccaagctancttggcganatttttnngaanctnanggaanctaaaaatggaaaaaaaaaantccctggaaaaaaccaccngttnaaaanatccnaanggnatcntaaaaaaaattttgaagnnnttnantnanttnntcaaggaacaaaaancnaaacgnttnanntngaaaataangnctttttnaaaaacntaaaaaaaaaaaaaacaaanttttatcnggnctttntnnaattnttncccccnnaaaagnncnncnnaattttnaangnaataaaaannnnannngnaaannaaaanttnccctttaancnttttnanaaaaaaaaaaanttttttnnnnnaaaaaaanaaantn

SEQ ID NO: 188 - DNA, 1394 bp, Homo Sapiens
  misc_feature (1)..(1): n is a, c, g, or t
  misc_feature (904)..(904): n is a, c, g, or t
  misc_feature (925)..(925): n is a, c, g, or t
  misc_feature (946)..(946): n is a, c, g, or t
  misc_feature (954)..(954): n is a, c, g, or t
  misc_feature (960)..(960): n is a, c, g, or t
  misc_feature (962)..(962): n is a, c, g, or t
  misc_feature (965)..(965): n is a, c, g, or t
  misc_feature (980)..(980): n is a, c, g, or t
  misc_feature (988)..(988): n is a, c, g, or t
  misc_feature (1007)..(1007): n is a, c, g, or t
  misc_feature (1011)..(1011): n is a, c, g, or t
  misc_feature (1016)..(1016): n is a, c, g, or t
  misc_feature (1027)..(1028): n is a, c, g, or t
  misc_feature (1039)..(1039): n is a, c, g, or t
  misc_feature (1042)..(1042): n is a, c, g, or t
  misc_feature (1045)..(1045): n is a, c, g, or t
  misc_feature (1049)..(1049): n is a, c, g, or t
  misc_feature (1054)..(1054): n is a, c, g, or t
  misc_feature (1068)..(1068): n is a, c, g, or t
  misc_feature (1086)..(1086): n is a, c, g, or t
  misc_feature (1099)..(1099): n is a, c, g, or t
  misc_feature (1103)..(1104): n is a, c, g, or t
  misc_feature (1112)..(1112): n is a, c, g, or t
  misc_feature (1114)..(1114): n is a, c, g, or t
  misc_feature (1117)..(1117): n is a, c, g, or t
  misc_feature (1126)..(1126): n is a, c, g, or t
  misc_feature (1131)..(1131): n is a, c, g, or t
  misc_feature (1133)..(1134): n is a, c, g, or t
  misc_feature (1137)..(1137): n is a, c, g, or t
  misc_feature (1139)..(1139): n is a, c, g, or t
  misc_feature (1143)..(1143): n is a, c, g, or t
  misc_feature (1148)..(1148): n is a, c, g, or t
  misc_feature (1150)..(1152): n is a, c, g, or t
  misc_feature (1154)..(1154): n is a, c, g, or t
  misc_feature (1159)..(1160): n is a, c, g, or t
  misc_feature (1162)..(1162): n is a, c, g, or t
  misc_feature (1172)..(1172): n is a, c, g, or t
  misc_feature (1182)..(1182): n is a, c, g, or t
  misc_feature (1185)..(1185): n is a, c, g, or t
  misc_feature (1189)..(1189): n is a, c, g, or t
  misc_feature (1195)..(1195): n is a, c, g, or t
  misc_feature (1198)..(1198): n is a, c, g, or t
  misc_feature (1200)..(1200): n is a, c, g, or t
  misc_feature (1204)..(1204): n is a, c, g, or t
  misc_feature (1207)..(1210): n is a, c, g, or t
  misc_feature (1213)..(1213): n is a, c, g, or t
  misc_feature (1217)..(1217): n is a, c, g, or t
  misc_feature (1219)..(1220): n is a, c, g, or t
  misc_feature (1228)..(1228): n is a, c, g, or t
  misc_feature (1235)..(1235): n is a, c, g, or t
  misc_feature (1237)..(1237): n is a, c, g, or t
  misc_feature (1241)..(1241): n is a, c, g, or t
  misc_feature (1252)..(1254): n is a, c, g, or t
  misc_feature (1257)..(1258): n is a, c, g, or t
  misc_feature (1262)..(1262): n is a, c, g, or t
  misc_feature (1265)..(1269): n is a, c, g, or t
  misc_feature (1271)..(1272): n is a, c, g, or t
  misc_feature (1275)..(1275): n is a, c, g, or t
  misc_feature (1278)..(1278): n is a, c, g, or t
  misc_feature (1280)..(1280): n is a, c, g, or t
  misc_feature (1285)..(1285): n is a, c, g, or t
  misc_feature (1287)..(1287): n is a, c, g, or t
  misc_feature (1289)..(1290): n is a, c, g, or t
  misc_feature (1293)..(1293): n is a, c, g, or t
  misc_feature (1296)..(1296): n is a, c, g, or t
  misc_feature (1304)..(1304): n is a, c, g, or t
  misc_feature (1307)..(1307): n is a, c, g, or t
  misc_feature (1322)..(1324): n is a, c, g, or t
  misc_feature (1331)..(1334): n is a, c, g, or t
  misc_feature (1336)..(1342): n is a, c, g, or t
  misc_feature (1344)..(1345): n is a, c, g, or t
  misc_feature (1347)..(1356): n is a, c, g, or t
  misc_feature (1358)..(1359): n is a, c, g, or t
  misc_feature (1361)..(1366): n is a, c, g, or t
  misc_feature (1370)..(1373): n is a, c, g, or t
  misc_feature (1375)..(1376): n is a, c, g, or t
  misc_feature (1379)..(1380): n is a, c, g, or t
  misc_feature (1382)..(1382): n is a, c, g, or t
  misc_feature (1384)..(1386): n is a, c, g, or t
  misc_feature (1388)..(1388): n is a, c, g, or t
  misc_feature (1394)..(1394): n is a, c, g, or t
naattagagaaattactatgagaggatcgcatcaccatcaccatcacggatcctatttaggtgacactatagaatcgtcgacccacgcgtccggtctggacaaccgcgactccttcgaggaggtgcagcggctcaggcagcagatcctcgacaccaagtcttgcctcaagaacaaaaccaaggagaacgtggacgtgcccctggtcatctgcggcaacaagggtgaccgcgacttctaccgcgaggtggaccagcgcgagatcgagcagctggtgggcgacgacccccagcgctgcgcctacttcgagatctcggccaagaagaacagcagcctggaccagatgttccgcgcgctcttcgccatggccaagctgcccagcgagatgagcccagacctgcaccgcaaggtctcggtgcagtactgcgacgtgctgcacaagaaggcgctgcggaacaagaagctgctgcgggccggcagcggcggcggcggcggcgacccgggcgacgcctttggcatcgtggcacccttcgcgcgccggcccagcgtacacagcgacctcatgtacatccgcgagaaggccagcgccggcagccaggccaaggacaaggagcgctgcgtcatcagctaggagccccgccgcgctggcgacacaacctaaggaggacctttttgttaagtcaaatccaacggcccggtgcgccccaggccgggagcgcgcgcggactggcgtctcccctcccggcgatccgcccccagcactggggaggcgccactgaaccgagaagggacggtcatctgctccggaaggaaagagaacgggccaagactgggactattccccacccccggtcccccattgaggcccgccacccccataactttgggagcgagggcccagccganggtggatttatcttctcaaanacctaaaaatgaaccccgggntggggganggaatntnaanttttccagcctctgntaggcttnaaaaaaaccgtcatgcccncttnaaggntcaggaacccnnggggcattatnttngtntgtnattcngggtttgctgtganaacccggtaaaacctctngccctcccaaaantaanngggggggngnggntcaaatcanaaccnanngantntttnatttngnnngnaactnncnaaagaaaacnaaaaaaaaanttngccntttaanggnanttcnggnnnnaanggancnnaaaaaacntttcccngntttnaacgggggggnnnaanncttnaannnnngnnttnttngnttttnanannaanaanattttaanggnaaaaaaaaaaagggnnnccccctnnnngnnnnnnnanntnnnnnnnnnngnncnnnnnnaaannnnannccnnancnnngntttttn

SEQ ID NO: 189 - DNA, 1200 bp, Homo Sapiens
  misc_feature (1)..(1): n is a, c, g, or t
  misc_feature (263)..(263): n is a, c, g, or t
  misc_feature (438)..(438): n is a, c, g, or t
  misc_feature (599)..(599): n is a, c, g, or t
  misc_feature (796)..(796): n is a, c, g, or t
  misc_feature (805)..(805): n is a, c, g, or t
  misc_feature (826)..(826): n is a, c, g, or t
  misc_feature (843)..(843): n is a, c, g, or t
  misc_feature (853)..(853): n is a, c, g, or t
  misc_feature (863)..(863): n is a, c, g, or t
  misc_feature (868)..(868): n is a, c, g, or t
  misc_feature (880)..(880): n is a, c, g, or t
  misc_feature (883)..(883): n is a, c, g, or t
  misc_feature (894)..(894): n is a, c, g, or t
  misc_feature (906)..(906): n is a, c, g, or t
  misc_feature (911)..(911): n is a, c, g, or t
  misc_feature (934)..(934): n is a, c, g, or t
  misc_feature (940)..(941): n is a, c, g, or t
  misc_feature (945)..(945): n is a, c, g, or t
  misc_feature (957)..(957): n is a, c, g, or t
  misc_feature (968)..(968): n is a, c, g, or t
  misc_feature (986)..(986): n is a, c, g, or t
  misc_feature (992)..(992): n is a, c, g, or t
  misc_feature (1002)..(1002): n is a, c, g, or t
  misc_feature (1019)..(1019): n is a, c, g, or t
  misc_feature (1024)..(1025): n is a, c, g, or t
  misc_feature (1027)..(1027): n is a, c, g, or t
  misc_feature (1031)..(1031): n is a, c, g, or t
  misc_feature (1035)..(1036): n is a, c, g, or t
  misc_feature (1038)..(1040): n is a, c, g, or t
  misc_feature (1046)..(1047): n is a, c, g, or t
  misc_feature (1054)..(1054): n is a, c, g, or t
  misc_feature (1056)..(1056): n is a, c, g, or t
  misc_feature (1058)..(1060): n is a, c, g, or t
  misc_feature (1065)..(1065): n is a, c, g, or t
  misc_feature (1068)..(1069): n is a, c, g, or t
  misc_feature (1078)..(1078): n is a, c, g, or t
  misc_feature (1083)..(1085): n is a, c, g, or t
  misc_feature (1090)..(1094): n is a, c, g, or t
  misc_feature (1097)..(1097): n is a, c, g, or t
  misc_feature (1102)..(1102): n is a, c, g, or t
  misc_feature (1104)..(1104): n is a, c, g, or t
  misc_feature (1112)..(1112): n is a, c, g, or t
  misc_feature (1114)..(1114): n is a, c, g, or t
  misc_feature (1122)..(1123): n is a, c, g, or t
  misc_feature (1125)..(1125): n is a, c, g, or t
  misc_feature (1130)..(1130): n is a, c, g, or t
  misc_feature (1132)..(1132): n is a, c, g, or t
  misc_feature (1134)..(1134): n is a, c, g, or t
  misc_feature (1143)..(1143): n is a, c, g, or t
  misc_feature (1148)..(1153): n is a, c, g, or t
  misc_feature (1155)..(1155): n is a, c, g, or t
  misc_feature (1158)..(1158): n is a, c, g, or t
  misc_feature (1165)..(1165): n is a, c, g, or t
  misc_feature (1167)..(1167): n is a, c, g, or t
  misc_feature (1171)..(1171): n is a, c, g, or t
  misc_feature (1177)..(1177): n is a, c, g, or t
  misc_feature (1179)..(1179): n is a, c, g, or t
  misc_feature (1182)..(1185): n is a, c, g, or t
  misc_feature (1187)..(1190): n is a, c, g, or t
  misc_feature (1193)..(1193): n is a, c, g, or t
  misc_feature (1196)..(1196): n is a, c, g, or t
  misc_feature (1198)..(1198): n is a, c, g, or t
  misc_feature (1200)..(1200): n is a, c, g, or t
naattagagaaaattactatgagaggatcgcatcaccatcaccatcacggatcctatttaggtgacactatagaatcgtcgacccacgcgtccgcccagccccgctgtctgcctggtggctgcagccgtggaggactcggtgctgctgctgaacccagctctgggggaccggctggtggcgggcagcacagatcagctgttgagcgccttcgtcccgcctgaggagccccccttgcagccggcccgctggctggaggcctcanaggaggagcgccaagtgggcctgcggctgcgcatctgccacgggaagccagtgacgcaggtgacctggcacgggcgtggggactacctggccgtggtgctggccacccaaggccacacccaggtgctgattcaccagctgagccgtcgccgcagccagagtccgttccgccgcanccacggacaggtgcagcgagtggccttccaccctgcccggcccttcctgttggtggcgtcccagcgcagcgtccgcctctaccacctgctgcgccaggagctcaccaagaagctgatgcccaactgcaagtgggtgtccagcctggcggtgcaccctgcangtgacaacgtcatctgtgggagctacgatagcaagctggtgtggtttgacctgaatctttccaccaagccatacaggatgctgagacaccacaagaaggctctgcgggctgtggccttccacccgcggtacccactctttgcgtcaggctcggacgacggcagtgtcatcgtctgccatggcatggtgtacaatgancttctgcanaaccccttgctggtgcccgtnaaggtgctgaaaagganacttgctgancctaaatctnggaantgctggaaagtnatntttcaacccanccagccgttggntcttntccttcggggggcaaaagggaantgttcnncctnattcacctaacnttttttgcctnactgggggctggggttgntccttntttaaattcnaaaaaaaccttttaccntgtgnnanaaanaaannannnaatatnnaaaaaananannnggggntgnntccaaaaantgaannnaaaannnnnttnaaaananaaaaatangnattttttnnanaaaanananaaaaaaatnaaaannnnnntntgnattttananaaanattttntnaannnngnnnnttntananan

SEQ ID NO: 190 - DNA, 1200 bp, Homo Sapiens
  misc_feature (2)..(2): n is a, c, g, or t
  misc_feature (5)..(12): n is a, c, g, or t
  misc_feature (773)..(773): n is a, c, g, or t
  misc_feature (829)..(829): n is a, c, g, or t
  misc_feature (835)..(835): n is a, c, g, or t
  misc_feature (875)..(875): n is a, c, g, or t
  misc_feature (895)..(895): n is a, c, g, or t
  misc_feature (912)..(912): n is a, c, g, or t
  misc_feature (915)..(915): n is a, c, g, or t
  misc_feature (918)..(918): n is a, c, g, or t
  misc_feature (980)..(980): n is a, c, g, or t
  misc_feature (983)..(983): n is a, c, g, or t
  misc_feature (1005)..(1005): n is a, c, g, or t
  misc_feature (1013)..(1013): n is a, c, g, or t
  misc_feature (1021)..(1021): n is a, c, g, or t
  misc_feature (1028)..(1028): n is a, c, g, or t
  misc_feature (1034)..(1034): n is a, c, g, or t
  misc_feature (1036)..(1036): n is a, c, g, or t
  misc_feature (1044)..(1044): n is a, c, g, or t
  misc_feature (1055)..(1056): n is a, c, g, or t
  misc_feature (1062)..(1062): n is a, c, g, or t
  misc_feature (1068)..(1068): n is a, c, g, or t
  misc_feature (1078)..(1078): n is a, c, g, or t
  misc_feature (1084)..(1084): n is a, c, g, or t
  misc_feature (1090)..(1090): n is a, c, g, or t
  misc_feature (1094)..(1094): n is a, c, g, or t
  misc_feature (1096)..(1097): n is a, c, g, or t
  misc_feature (1104)..(1104): n is a, c, g, or t
  misc_feature (1106)..(1106): n is a, c, g, or t
  misc_feature (1111)..(1111): n is a, c, g, or t
  misc_feature (1119)..(1120): n is a, c, g, or t
  misc_feature (1125)..(1127): n is a, c, g, or t
  misc_feature (1129)..(1129): n is a, c, g, or t
  misc_feature (1132)..(1132): n is a, c, g, or t
  misc_feature (1142)..(1142): n is a, c, g, or t
  misc_feature (1144)..(1145): n is a, c, g, or t
  misc_feature (1149)..(1149): n is a, c, g, or t
  misc_feature (1153)..(1153): n is a, c, g, or t
  misc_feature (1160)..(1160): n is a, c, g, or t
  misc_feature (1163)..(1164): n is a, c, g, or t
  misc_feature (1168)..(1168): n is a, c, g, or t
  misc_feature (1170)..(1170): n is a, c, g, or t
  misc_feature (1173)..(1173): n is a, c, g, or t
  misc_feature (1179)..(1179): n is a, c, g, or t
  misc_feature (1188)..(1188): n is a, c, g, or t
  misc_feature (1199)..(1200): n is a, c, g, or t
gnttnnnnnnnnaatagagaaattactatgagaggatcgcatcaccatcaccatcacggatcctatttaggtgacactatagaatcgtcgacccacgcgtccgcgcccaggatggcggaagtggaggcgccgacggcggccgagacggacatgaagcaatatcaaggctccggcggcgtcgccatggatgtggaacggagtcgcttcccctactgcgtggtgtggacgcccatcccggtgctcacgtggtttttccccatcatcggccacatgggcatctgcacatccacaggagtcattcgggacttcgcgggcccctactttgtctcagaggacaacatggcctttggaaagcctgccaagtactggaagttggaccctgctcaggtctatgctagcgggcccaacgcatgggacacggctgtgcacgacgcctctgaggagtacaagcaccgcatgcacaatctctgctgtgacaactgccactcgcacgtggcattggccctgaatctgatgcgctacaacaacagcaccaactggaatatggtgacgctctgcttcttctgcctgctctacgggaagtacgtcagcgttggggccttcgtgaagacctggctgcccttcatccttctcctgggcatcatcctcaccgtcagcctggtctttaacctccggtgatggctgctcggtggccccacacccaccagggtcccgaggaaacagccgccatcccttttggttccagatttttttctcctcaccccaaaaggcanggttgggcctgctgttgtggaccgggggtcggggctggcaggatggaaggactgangaccancatgaagtggggggtttgttgtctccctgcctctcaaaancaccctgtcccctcctcccnaggcctgtgactccggnccntgnaaccccctttgttcttctgttgaaaggctttggcttccctctgtaaaaactgcttcccgccnccnacctgctgggggtcctgcctcnaccccaantgcccatnatggggnaaaagnangaaatttngggcctccccnnttcaangggggnccctgggaancaaaanttggtncccnannatggggngncaccngggtaaannttaannngntcnctaaaaaccnanntttntttnagaaacnttnnccantnggncctttnaaaaagggnccaaaaagggnn

SEQ ID NO: 191 - DNA, 1200 bp, Homo Sapiens
  misc_feature (828)..(828): n is a, c, g, or t
  misc_feature (873)..(873): n is a, c, g, or t
  misc_feature (903)..(903): n is a, c, g, or t
  misc_feature (909)..(909): n is a, c, g, or t
  misc_feature (941)..(941): n is a, c, g, or t
  misc_feature (1006)..(1006): n is a, c, g, or t
  misc_feature (1015)..(1015): n is a, c, g, or t
  misc_feature (1029)..(1029): n is a, c, g, or t
  misc_feature (1048)..(1048): n is a, c, g, or t
  misc_feature (1052)..(1052): n is a, c, g, or t
  misc_feature (1055)..(1055): n is a, c, g, or t
  misc_feature (1088)..(1088): n is a, c, g, or t
  misc_feature (1093)..(1094): n is a, c, g, or t
  misc_feature (1098)..(1098): n is a, c, g, or t
  misc_feature (1124)..(1124): n is a, c, g, or t
  misc_feature (1137)..(1137): n is a, c, g, or t
  misc_feature (1144)..(1146): n is a, c, g, or t
  misc_feature (1150)..(1150): n is a, c, g, or t
  misc_feature (1157)..(1157): n is a, c, g, or t
  misc_feature (1159)..(1159): n is a, c, g, or t
  misc_feature (1164)..(1165): n is a, c, g, or t
  misc_feature (1173)..(1173): n is a, c, g, or t
  misc_feature (1182)..(1182): n is a, c, g, or t
  misc_feature (1184)..(1184): n is a, c, g, or t
  misc_feature (1194)..(1194): n is a, c, g, or t
tagagaaattactatgagaggatcgcatcaccatcaccatcacggatcctatttaggtgacactatagaatcgtcgacccacgcgtccgaaagaagatggtgctggatctggatttgtttcgggtggataaaggaggggacccagccctcatccgagagacgcaggagaagcgcttcaaggacccgggactagtggaccagctggtgaaggcagacagcgagtggcgacgatatttcgggcagacaacttgaacaagctgaagaacctatgcagcaagacaatcggagagaaaatgaagaaaaaagagccagtgggagatgatgagtctgtcccagagaatgtgctgagtttcgatgaccttactgcagacgctttagctaacctgaaagtctcacaaatcaaaaaagtccgactcctcattgatgaagccatcctgaagtgtgacgcggagcggataaagttggaagcagagcggtttgagaacctccgagagattgggaaccttctgcacccttctgtacccatcagtaacgatgaggatgtggacaacaaagtagagaggatttggggtgattgtacagtcaggaagaagtactctcatgtggacctggtggtgatggtagatggctttgaaggcgaaaagggggccgtggtggctgggagtcgagggtacttcttgaagggggtcctggtgttcctggaacaggctctcatccagtatgcccttcgcaccttgggaagtcggggctacattcccatttataccccctttttcatgaggaaggaggtcatgcaggaggtggcacagctcagccagtttgatgaanaactttataaggtgattggcaaaggcagtgaaaagtctgatgacnactcctatgatgagaagtacctgattgccncctcanagcagcccattgctgccctgcaccgggatgantggctccggccggaggacctgcccatcaagtatgctggcctgtctacctgcttccgtcaggaggngggctcccntggccgtgaccccngtggcatcttccgagtccntcanttngaaaaattgaacagtttgggtactcctcccccntgacnncaantcttgggaaatttttaaaaaattatncccccccaaagantttcccnnncccnggggatncnttccnnttgggaantttttcccngnttttttaacncgcgcc

SEQ ID NO: 192 - DNA, 1397 bp, Homo Sapiens
  misc_feature (2)..(3): n is a, c, g, or t
  misc_feature (6)..(8): n is a, c, g, or t
  misc_feature (10)..(10): n is a, c, g, or t
  misc_feature (111)..(111): n is a, c, g, or t
  misc_feature (321)..(321): n is a, c, g, or t
  misc_feature (333)..(333): n is a, c, g, or t
  misc_feature (343)..(343): n is a, c, g, or t
  misc_feature (359)..(359): n is a, c, g, or t
  misc_feature (365)..(365): n is a, c, g, or t
  misc_feature (368)..(368): n is a, c, g, or t
  misc_feature (373)..(373): n is a, c, g, or t
  misc_feature (387)..(387): n is a, c, g, or t
  misc_feature (393)..(393): n is a, c, g, or t
  misc_feature (400)..(400): n is a, c, g, or t
  misc_feature (402)..(402): n is a, c, g, or t
  misc_feature (406)..(406): n is a, c, g, or t
  misc_feature (411)..(411): n is a, c, g, or t
  misc_feature (413)..(415): n is a, c, g, or t
  misc_feature (420)..(422): n is a, c, g, or t
  misc_feature (425)..(425): n is a, c, g, or t
  misc_feature (431)..(431): n is a, c, g, or t
  misc_feature (433)..(433): n is a, c, g, or t
  misc_feature (435)..(435): n is a, c, g, or t
  misc_feature (438)..(438): n is a, c, g, or t
  misc_feature (441)..(441): n is a, c, g, or t
  misc_feature (443)..(443): n is a, c, g, or t
  misc_feature (451)..(451): n is a, c, g, or t
  misc_feature (468)..(469): n is a, c, g, or t
  misc_feature (479)..(480): n is a, c, g, or t
  misc_feature (483)..(483): n is a, c, g, or t
  misc_feature (487)..(487): n is a, c, g, or t
  misc_feature (492)..(492): n is a, c, g, or t
  misc_feature (494)..(495): n is a, c, g, or t
  misc_feature (498)..(498): n is a, c, g, or t
  misc_feature (501)..(501): n is a, c, g, or t
  misc_feature (503)..(504): n is a, c, g, or t
  misc_feature (508)..(508): n is a, c, g, or t
  misc_feature (511)..(513): n is a, c, g, or t
  misc_feature (516)..(516): n is a, c, g, or t
  misc_feature (522)..(523): n is a, c, g, or t
  misc_feature (528)..(528): n is a, c, g, or t
  misc_feature (531)..(531): n is a, c, g, or t
  misc_feature (533)..(533): n is a, c, g, or t
  misc_feature (550)..(550): n is a, c, g, or t
  misc_feature (553)..(553): n is a, c, g, or t
  misc_feature (573)..(573): n is a, c, g, or t
  misc_feature (578)..(578): n is a, c, g, or t
  misc_feature (583)..(583): n is a, c, g, or t
  misc_feature (590)..(590): n is a, c, g, or t
  misc_feature (593)..(593): n is a, c, g, or t
  misc_feature (600)..(600): n is a, c, g, or t
  misc_feature (605)..(605): n is a, c, g, or t
  misc_feature (607)..(608): n is a, c, g, or t
  misc_feature (611)..(611): n is a, c, g, or t
  misc_feature (614)..(614): n is a, c, g, or t
  misc_feature (616)..(616): n is a, c, g, or t
  misc_feature (618)..(618): n is a, c, g, or t
  misc_feature (623)..(623): n is a, c, g, or t
  misc_feature (628)..(628): n is a, c, g, or t
  misc_feature (630)..(631): n is a, c, g, or t
  misc_feature (633)..(633): n is a, c, g, or t
  misc_feature (649)..(649): n is a, c, g, or t
  misc_feature (655)..(656): n is a, c, g, or t
  misc_feature (658)..(658): n is a, c, g, or t
  misc_feature (660)..(660): n is a, c, g, or t
  misc_feature (666)..(666): n is a, c, g, or t
  misc_feature (668)..(668): n is a, c, g, or t
  misc_feature (671)..(671): n is a, c, g, or t
  misc_feature (673)..(673): n is a, c, g, or t
  misc_feature (677)..(677): n is a, c, g, or t
  misc_feature (686)..(686): n is a, c, g, or t
  misc_feature (688)..(689): n is a, c, g, or t
  misc_feature (693)..(693): n is a, c, g, or t
  misc_feature (696)..(697): n is a, c, g, or t
  misc_feature (699)..(699): n is a, c, g, or t
  misc_feature (707)..(707): n is a, c, g, or t
  misc_feature (710)..(710): n is a, c, g, or t
  misc_feature (720)..(721): n is a, c, g, or t
  misc_feature (725)..(725): n is a, c, g, or t
  misc_feature (729)..(729): n is a, c, g, or t
  misc_feature (732)..(732): n is a, c, g, or t
  misc_feature (735)..(735): n is a, c, g, or t
  misc_feature (738)..(740): n is a, c, g, or t
  misc_feature (742)..(742): n is a, c, g, or t
  misc_feature (746)..(747): n is a, c, g, or t
  misc_feature (751)..(751): n is a, c, g, or t
  misc_feature (761)..(762): n is a, c, g, or t
  misc_feature (771)..(771): n is a, c, g, or t
  misc_feature (781)..(782): n is a, c, g, or t
  misc_feature (793)..(794): n is a, c, g, or t
  misc_feature (796)..(797): n is a, c, g, or t
  misc_feature (799)..(799): n is a, c, g, or t
  misc_feature (805)..(806): n is a, c, g, or t
  misc_feature (811)..(811): n is a, c, g, or t
  misc_feature (820)..(820): n is a, c, g, or t
  misc_feature (833)..(833): n is a, c, g, or t
  misc_feature (840)..(842): n is a, c, g, or t
  misc_feature (845)..(846): n is a, c, g, or t
  misc_feature (852)..(852): n is a, c, g, or t
  misc_feature (870)..(871): n is a, c, g, or t
  misc_feature (873)..(873): n is a, c, g, or t
  misc_feature (875)..(875): n is a, c, g, or t
  misc_feature (877)..(877): n is a, c, g, or t
  misc_feature (883)..(884): n is a, c, g, or t
  misc_feature (888)..(888): n is a, c, g, or t
  misc_feature (895)..(895): n is a, c, g, or t
  misc_feature (897)..(897): n is a, c, g, or t
  misc_feature (899)..(899): n is a, c, g, or t
  misc_feature (902)..(903): n is a, c, g, or t
  misc_feature (910)..(910): n is a, c, g, or t
  misc_feature (912)..(912): n is a, c, g, or t
  misc_feature (917)..(917): n is a, c, g, or t
  misc_feature (923)..(923): n is a, c, g, or t
  misc_feature (927)..(927): n is a, c, g, or t
  misc_feature (929)..(929): n is a, c, g, or t
  misc_feature (942)..(943): n is a, c, g, or t
  misc_feature (945)..(946): n is a, c, g, or t
  misc_feature (948)..(948): n is a, c, g, or t
  misc_feature (952)..(952): n is a, c, g, or t
  misc_feature (961)..(961): n is a, c, g, or t
  misc_feature (968)..(968): n is a, c, g, or t
  misc_feature (970)..(970): n is a, c, g, or t
  misc_feature (976)..(976): n is a, c, g, or t
  misc_feature (979)..(979): n is a, c, g, or t
  misc_feature (981)..(981): n is a, c, g, or t
  misc_feature (984)..(984): n is a, c, g, or t
  misc_feature (989)..(990): n is a, c, g, or t
  misc_feature (997)..(997): n is a, c, g, or t
  misc_feature (1002)..(1002): n is a, c, g, or t
  misc_feature (1005)..(1007): n is a, c, g, or t
  misc_feature (1015)..(1015): n is a, c, g, or t
  misc_feature (1020)..(1020): n is a, c, g, or t
  misc_feature (1024)..(1024): n is a, c, g, or t
  misc_feature (1027)..(1028): n is a, c, g, or t
  misc_feature (1034)..(1034): n is a, c, g, or t
  misc_feature (1037)..(1037): n is a, c, g, or t
  misc_feature (1040)..(1040): n is a, c, g, or t
  misc_feature (1045)..(1045): n is a, c, g, or t
  misc_feature (1051)..(1052): n is a, c, g, or t
  misc_feature (1056)..(1056): n is a, c, g, or t
  misc_feature (1060)..(1060): n is a, c, g, or t
  misc_feature (1068)..(1069): n is a, c, g, or t
  misc_feature (1071)..(1071): n is a, c, g, or t
  misc_feature (1085)..(1085): n is a, c, g, or t
  misc_feature (1095)..(1095): n is a, c, g, or t
  misc_feature (1101)..(1101): n is a, c, g, or t
  misc_feature (1104)..(1104): n is a, c, g, or t
  misc_feature (1113)..(1113): n is a, c, g, or t
  misc_feature (1121)..(1121): n is a, c, g, or t
  misc_feature (1123)..(1123): n is a, c, g, or t
  misc_feature (1127)..(1129): n is a, c, g, or t
  misc_feature (1135)..(1136): n is a, c, g, or t
  misc_feature (1141)..(1141): n is a, c, g, or t
  misc_feature (1145)..(1145): n is a, c, g, or t
  misc_feature (1147)..(1147): n is a, c, g, or t
  misc_feature (1149)..(1150): n is a, c, g, or t
  misc_feature (1152)..(1152): n is a, c, g, or t
  misc_feature (1159)..(1159): n is a, c, g, or t
  misc_feature (1164)..(1164): n is a, c, g, or t
  misc_feature (1167)..(1168): n is a, c, g, or t
  misc_feature (1171)..(1171): n is a, c, g, or t
  misc_feature (1174)..(1174): n is a, c, g, or t
  misc_feature (1178)..(1178): n is a, c, g, or t
  misc_feature (1183)..(1184): n is a, c, g, or t
  misc_feature (1192)..(1192): n is a, c, g, or t
  misc_feature (1198)..(1198): n is a, c, g, or t
  misc_feature (1203)..(1203): n is a, c, g, or t
  misc_feature (1209)..(1209): n is a, c, g, or t
  misc_feature (1214)..(1214): n is a, c, g, or t
  misc_feature (1218)..(1218): n is a, c, g, or t
  misc_feature (1220)..(1220): n is a, c, g, or t
  misc_feature (1222)..(1222): n is a, c, g, or t
  misc_feature (1224)..(1224): n is a, c, g, or t
  misc_feature (1230)..(1231): n is a, c, g, or t
  misc_feature (1234)..(1234): n is a, c, g, or t
  misc_feature (1237)..(1238): n is a, c, g, or t
  misc_feature (1243)..(1243): n is a, c, g, or t
  misc_feature (1245)..(1247): n is a, c, g, or t
  misc_feature (1255)..(1256): n is a, c, g, or t
  misc_feature (1267)..(1267): n is a, c, g, or t
  misc_feature (1283)..(1283): n is a, c, g, or t
  misc_feature (1286)..(1286): n is a, c, g, or t
  misc_feature (1292)..(1292): n is a, c, g, or t
  misc_feature (1295)..(1295): n is a, c, g, or t
  misc_feature (1304)..(1304): n is a, c, g, or t
  misc_feature (1324)..(1325): n is a, c, g, or t
  misc_feature (1332)..(1332): n is a, c, g, or t
  misc_feature (1338)..(1338): n is a, c, g, or t
  misc_feature (1342)..(1342): n is a, c, g, or t
  misc_feature (1345)..(1345): n is a, c, g, or t
  misc_feature (1348)..(1348): n is a, c, g, or t
  misc_feature (1350)..(1350): n is a, c, g, or t
  misc_feature (1355)..(1355): n is a, c, g, or t
  misc_feature (1357)..(1358): n is a, c, g, or t
  misc_feature (1360)..(1361): n is a, c, g, or t
  misc_feature (1363)..(1363): n is a, c, g, or t
  misc_feature (1370)..(1370): n is a, c, g, or t
  misc_feature (1378)..(1378): n is a, c, g, or t
  misc_feature (1381)..(1381): n is a, c, g, or t
  misc_feature (1385)..(1385): n is a, c, g, or t
  misc_feature (1388)..(1388): n is a, c, g, or t
  misc_feature (1390)..(1391): n is a, c, g, or t
  misc_feature (1396)..(1396): n is a, c, g, or t
gnnaannnanttagagagaattactatgagaggatcgcatcaccatcaccatcacgggatcctatttaggtgacactatagaatcgtcgacccacgcgtccgcggacgcgntgggttgccagccagtccgcccgtccggagcccggctcgctggggcagcatggcggggtcgccgctgctctgggggccgcgggccgggggcgtcggccttttggtgctgctgctgctcggcctgtttcggccgccccccgcgctctgcgcgcggccggtaaaggagccccgcggcctaagcgcagcgtctccgcccttggctgagactgncgctcctcgccncttccggcgntcagtgccccaaggtnaggcgncgnagacngtgcatgaactggnagcggncgctggngnatcnactanannncgaannncangagcantngngantcnanaatacatnatgctgaaatatcagtnngaataccatnntgnaagnatctncnnaanaantnngaanacnnncantaacannaatgnacntnaaaaatattgcaacaanaanatataacgcgaactaaaatngaaanatctnctaaccnatnatggtanaacanannagnaantntnacaanataananngnaaaactaaatttattnaaaaannancntaaacnanaantnaatnaacaaaaancnngacngannanaaataatnaanaaataatttnnattntaanaanaanaannntnaaannatanaaaagcaatnnataaacagnacaataatannaaacatcgaannannantaatannaaacncaatacaanaaaaaataatttnaaaaaannnatnntatctnattaaaatttaacaaccnncncntnaaaacnntaanaacaacnantncannaaaaaananactantaaagntcancngaccatttaaatnncnntnaaanataaaaaanaaaaaancnataaantananatnaaatnnttatttnaaacnatnnnaacaaacntctanaaanaannatatanaanaanaaacnaaaaanntttnatantaagatcnnanatcatcaaaaattnatgaaaaaanaaaacnaanaaagttcantaaaatcntnattnnnaaatanncacanaaananannanataatcnaaatnaanntanagnaacntacgnnatataatnaacctntttanaaaaanaaatnaaancncntnaatatnnctnaanntaatnannnaaaaaaannattattagtanacaaaaacataaaatntantatttnaanaaaaaaaanaataatttttaaaaattaannattaacnattatncaanaanttntntaaancnntnnanaaaaatntatatatnttnttgnaancnnattcng

SEQ ID NO: 193 - DNA, 1200 bp, Homo Sapiens
  misc_feature (1)..(1): n is a, c, g, or t
  misc_feature (932)..(932): n is a, c, g, or t
  misc_feature (957)..(957): n is a, c, g, or t
  misc_feature (977)..(977): n is a, c, g, or t
  misc_feature (1007)..(1007): n is a, c, g, or t
  misc_feature (1015)..(1015): n is a, c, g, or t
  misc_feature (1032)..(1033): n is a, c, g, or t
  misc_feature (1036)..(1037): n is a, c, g, or t
  misc_feature (1044)..(1044): n is a, c, g, or t
  misc_feature (1046)..(1046): n is a, c, g, or t
  misc_feature (1053)..(1054): n is a, c, g, or t
  misc_feature (1058)..(1058): n is a, c, g, or t
  misc_feature (1061)..(1061): n is a, c, g, or t
  misc_feature (1079)..(1079): n is a, c, g, or t
  misc_feature (1086)..(1086): n is a, c, g, or t
  misc_feature (1092)..(1092): n is a, c, g, or t
  misc_feature (1106)..(1106): n is a, c, g, or t
  misc_feature (1111)..(1111): n is a, c, g, or t
  misc_feature (1121)..(1121): n is a, c, g, or t
  misc_feature (1129)..(1129): n is a, c, g, or t
  misc_feature (1133)..(1133): n is a, c, g, or t
  misc_feature (1135)..(1136): n is a, c, g, or t
  misc_feature (1140)..(1140): n is a, c, g, or t
  misc_feature (1149)..(1149): n is a, c, g, or t
  misc_feature (1153)..(1153): n is a, c, g, or t
  misc_feature (1161)..(1161): n is a, c, g, or t
  misc_feature (1166)..(1166): n is a, c, g, or t
  misc_feature (1168)..(1168): n is a, c, g, or t
  misc_feature (1173)..(1173): n is a, c, g, or t
  misc_feature (1179)..(1179): n is a, c, g, or t
  misc_feature (1181)..(1181): n is a, c, g, or t
  misc_feature (1183)..(1183): n is a, c, g, or t
  misc_feature (1185)..(1185): n is a, c, g, or t
  misc_feature (1187)..(1187): n is a, c, g, or t
  misc_feature (1190)..(1190): n is a, c, g, or t
  misc_feature (1192)..(1193): n is a, c, g, or t
  misc_feature (1195)..(1195): n is a, c, g, or t
naattagagaaattactatgagaggatcgcatcaccatcaccatcacggatcctatttaggtgacactatagaatcgtcgacccacgcgtccgcccagatctacccagacccggagctggaagtacaagtattgggcctgcctatccgctgcatccacagtgaggagggctgccgctggagtgggccactacgtcatctacagggccacctgaatacctgcagcttcaatgtcattccctgccctaatcgctgccccatgaagctgagccgccgtgatctacctgcacacttgcagcatgactgccccaagcggcgcctcaagtgcgagttttgtggctgtgacttcagtggggaggcctatgagagccatgagggtatgtgcccccaagcgcactcagccctgcacctactgcactaaggagtttgtctttgacaccatccagagccaccagtaccagtgcccaaggctgcctgttgcctgccccaaccaatgtggtgtgggcactgtggctcgggaggacctgccaggccatctgaaggacagctgtaacaccgccctggtgctctgcccattcaaagactccggctgcaagcacaggtgccctaagctggcaatggcacggcatgtggaggagagtgtgaagccacatctggccatgatgtgtgccctggtgagccggcaacggcaggagctgcaggagcttcggcgagagctggaggagctatcagtgggcagtgatggcgtgctcatctggaagattggcagctatggacggcggctacaggaggccaaggccaagcccaaccttgagtgcttcagcccagccttctacacacataagtatggttacaagctgcaggtgtctgcattcctcaatggcaatggcagtggtgagggcacacacctctcactgtacattcgtgtgctgcntggtgcctttgaaaatctccttgantggcccttttgcccgccggngtcaccttctccctgctggatcaaaacgancctggggntggttaaaccacagcanntcnntgaaacntnccccccnnaccnaantggaaaaatttccaaaanccaggcncgtggnggggctccctgganaaaanttttctgggntttggttntccnanntttnttccccccngaanttcaaaancaaantnttggngggaanangnancnttncnncnggcgg

SEQ ID NO: 194 - DNA, 1200 bp, Homo Sapiens
  misc_feature (872)..(872): n is a, c, g, or t
  misc_feature (956)..(956): n is a, c, g, or t
  misc_feature (967)..(967): n is a, c, g, or t
  misc_feature (970)..(970): n is a, c, g, or t
  misc_feature (978)..(978): n is a, c, g, or t
  misc_feature (991)..(991): n is a, c, g, or t
  misc_feature (993)..(993): n is a, c, g, or t
  misc_feature (997)..(997): n is a, c, g, or t
  misc_feature (1000)..(1001): n is a, c, g, or t
  misc_feature (1003)..(1003): n is a, c, g, or t
  misc_feature (1006)..(1006): n is a, c, g, or t
  misc_feature (1010)..(1010): n is a, c, g, or t
  misc_feature (1017)..(1017): n is a, c, g, or t
  misc_feature (1026)..(1026): n is a, c, g, or t
  misc_feature (1037)..(1037): n is a, c, g, or t
  misc_feature (1039)..(1039): n is a, c, g, or t
  misc_feature (1047)..(1047): n is a, c, g, or t
  misc_feature (1094)..(1094): n is a, c, g, or t
  misc_feature (1105)..(1105): n is a, c, g, or t
  misc_feature (1131)..(1131): n is a, c, g, or t
  misc_feature (1134)..(1134): n is a, c, g, or t
  misc_feature (1141)..(1141): n is a, c, g, or t
  misc_feature (1149)..(1149): n is a, c, g, or t
  misc_feature (1151)..(1151): n is a, c, g, or t
  misc_feature (1161)..(1162): n is a, c, g, or t
  misc_feature (1168)..(1168): n is a, c, g, or t
  misc_feature (1173)..(1174): n is a, c, g, or t
  misc_feature (1179)..(1179): n is a, c, g, or t
  misc_feature (1183)..(1183): n is a, c, g, or t
  misc_feature (1187)..(1187): n is a, c, g, or t
  misc_feature (1191)..(1191): n is a, c, g, or t
  misc_feature (1194)..(1194): n is a, c, g, or t
tagagaaattactatgagaggatcgcatcaccatcaccatcacggatcctatttaggtgacactatagaatcgtcgacccacgcgtccggcgcggggcccgcccctgggaccctccgggccgggcggtttggccccttagcgcccgggcgtcggggcggtaaaaggccggcagaagggaggcacttgagaaatgtctttcctccaggacccaagtttcttcaccatggggatgtggtccattggtgcaggagccctgggggctgctgccttggcattgctgcttgccaacacagacgtgtttctgtccaagccccagaaagcggccctggagtacctggaggatatagacctgaaaacactggagaaggaaccaaggactttcaaagcaaaggagctatgggaaaaaaatggagctgtgattatggccgtgcggaggccaggctgtttcctctgtcgagaggaagctgcggatctgtcctccctgaaaagcatgttggaccagctgggcgtccccctctatgcagtggtaaaggagcacatcaggactgaagtgaaggatttccagccttatttcaaaggagaaatcttcctggatgaaaagaaaaagttctatggtccacaaaggcggaagatgatgtttatgggatttatccgtctgggagtgtggtacaacttcttccgagcctggaacggaggcttctctggaaacctggaaggagaaggcttcatccttgggggagttttcgtggtgggatcaggaaagcagggcattcttcttgagcaccgagaaaaagaatttggagacaaagtaaacctactttctgttctggaagctgctaagatgatcaaaccacagactttggcctcaaanaaaaaaatgattgtgtgaaactgcccagctcagggataaccagggacattcacctgtgttcatgggatgtattgtttccactcntgtcccctaangantgaaaaanccatttatacccnanctcncannanggnatantaaaggnattttaaanattccggttangncccctaangcaaaataacccccaaaacaaaactgaaaaaaaatctgaaaaactantgaggattatnaacctaaaacctggggaaaaagaagnctnaaaattnactgccangntggggtgcannggctcnaaccnntaatncccnaccntttnggnagccaa

SEQ ID NO: 195 - DNA, 1200 bp, Homo Sapiens
  misc_feature (917)..(917): n is a, c, g, or t
  misc_feature (920)..(920): n is a, c, g, or t
  misc_feature (923)..(923): n is a, c, g, or t
  misc_feature (931)..(931): n is a, c, g, or t
  misc_feature (934)..(934): n is a, c, g, or t
  misc_feature (937)..(937): n is a, c, g, or t
  misc_feature (954)..(954): n is a, c, g, or t
  misc_feature (966)..(966): n is a, c, g, or t
  misc_feature (976)..(976): n is a, c, g, or t
  misc_feature (982)..(983): n is a, c, g, or t
  misc_feature (990)..(993): n is a, c, g, or t
  misc_feature (996)..(998): n is a, c, g, or t
  misc_feature (1000)..(1001): n is a, c, g, or t
  misc_feature (1003)..(1005): n is a, c, g, or t
  misc_feature (1022)..(1022): n is a, c, g, or t
  misc_feature (1026)..(1026): n is a, c, g, or t
  misc_feature (1029)..(1029): n is a, c, g, or t
  misc_feature (1038)..(1038): n is a, c, g, or t
  misc_feature (1040)..(1040): n is a, c, g, or t
  misc_feature (1044)..(1044): n is a, c, g, or t
  misc_feature (1052)..(1052): n is a, c, g, or t
  misc_feature (1059)..(1059): n is a, c, g, or t
  misc_feature (1065)..(1065): n is a, c, g, or t
  misc_feature (1068)..(1068): n is a, c, g, or t
  misc_feature (1077)..(1077): n is a, c, g, or t
  misc_feature (1081)..(1081): n is a, c, g, or t
  misc_feature (1091)..(1091): n is a, c, g, or t
  misc_feature (1102)..(1103): n is a, c, g, or t
  misc_feature (1109)..(1109): n is a, c, g, or t
  misc_feature (1111)..(1111): n is a, c, g, or t
  misc_feature (1119)..(1120): n is a, c, g, or t
  misc_feature (1124)..(1124): n is a, c, g, or t
  misc_feature (1126)..(1126): n is a, c, g, or t
  misc_feature (1140)..(1141): n is a, c, g, or t
  misc_feature (1148)..(1148): n is a, c, g, or t
  misc_feature (1163)..(1164): n is a, c, g, or t
  misc_feature (1167)..(1167): n is a, c, g, or t
  misc_feature (1176)..(1177): n is a, c, g, or t
  misc_feature (1186)..(1186): n is a, c, g, or t
  misc_feature (1197)..(1197): n is a, c, g, or t
attagagaaattactatgagaggatcgcatcaccatcaccatcacggatcctatttaggtgacactatagaatcgtcgacccacgcgtccgcggacgcgtgggggggtaacaagatggcgaccgagacggtggagctccataagctaaagcttgccgaactaaagcaagaatgtcttgctcgtggtttggagaccaagggaataaagcaagatcttatccacagactccaggcatatcttgaagaacatgctgaagaggaggcaaatgaagaagatgtactgggagatgaaacagaggaagaagaaacaaagcccattgagctccctgtcaaagaggaagaaccccctgaaaaaactgttgatgtggcagcagagaagaaagtggtgaaaattacatctgaaataccacagactgagagaatgcagaagagggctgaacgattcaatgtacctgtgagcttggagagtaagaaagctgctcgggcagctaggtttgggatttcttcagttccaacaaaaggtctgtcatctgataacaaacctatggttaacttggataagctgaaggaaagagctcaaagatttggtttgaatgtctcttcaatctccagaaagtctgaagatgatgagaaactgaaaaagaggaaggagcgatttgggattgtcacaagttcagctggaactggaaccacagaggatacagaggcaaagaagaggaaaagagcagagcgctttgggattgcctgatgaaaagttcctgatactttctgttctccagtgttttccatttctctccttcttcttggtcacatatatgcctaaatgcacagtcatgtgcctacgtcctgcctcgcaatgagggagcatgtaccccaggtacatccatgaactgcggcagcagtttgacttattgctgnttncancttaaggntgntgngttttgtttttgattangttgcttgttantaaaaaaaanttggannggagaannnnaannnannannnaaaaaagggcggccccncccnatnaggggcccnantaancttaattnacctgancttggnacncctgttganaaancccgtaatgnccccccaaacnncctctngnatttttcnnaaancncggttgcccccggnnttttttnttggggaaaatcccnnctncttggcgannttttccggnccttagggaancta

SEQ ID NO: 196 - DNA, 1342 bp, Homo Sapiens
  misc_feature (870)..(870): n is a, c, g, or t
  misc_feature (974)..(974): n is a, c, g, or t
  misc_feature (980)..(980): n is a, c, g, or t
  misc_feature (984)..(984): n is a, c, g, or t
  misc_feature (989)..(989): n is a, c, g, or t
  misc_feature (997)..(997): n is a, c, g, or t
  misc_feature (1003)..(1003): n is a, c, g, or t
  misc_feature (1009)..(1009): n is a, c, g, or t
  misc_feature (1011)..(1011): n is a, c, g, or t
  misc_feature (1024)..(1024): n is a, c, g, or t
  misc_feature (1027)..(1027): n is a, c, g, or t
  misc_feature (1030)..(1030): n is a, c, g, or t
  misc_feature (1042)..(1042): n is a, c, g, or t
  misc_feature (1050)..(1050): n is a, c, g, or t
  misc_feature (1053)..(1054): n is a, c, g, or t
  misc_feature (1067)..(1067): n is a, c, g, or t
  misc_feature (1075)..(1075): n is a, c, g, or t
  misc_feature (1082)..(1082): n is a, c, g, or t
  misc_feature (1087)..(1087): n is a, c, g, or t
  misc_feature (1091)..(1091): n is a, c, g, or t
  misc_feature (1094)..(1094): n is a, c, g, or t
  misc_feature (1096)..(1096): n is a, c, g, or t
  misc_feature (1100)..(1100): n is a, c, g, or t
  misc_feature (1109)..(1109): n is a, c, g, or t
  misc_feature (1122)..(1122): n is a, c, g, or t
  misc_feature (1125)..(1125): n is a, c, g, or t
  misc_feature (1130)..(1130): n is a, c, g, or t
  misc_feature (1135)..(1135): n is a, c, g, or t
  misc_feature (1138)..(1139): n is a, c, g, or t
  misc_feature (1152)..(1152): n is a, c, g, or t
  misc_feature (1156)..(1156): n is a, c, g, or t
  misc_feature (1173)..(1173): n is a, c, g, or t
  misc_feature (1187)..(1187): n is a, c, g, or t
  misc_feature (1191)..(1192): n is a, c, g, or t
  misc_feature (1197)..(1198): n is a, c, g, or t
  misc_feature (1201)..(1203): n is a, c, g, or t
  misc_feature (1207)..(1208): n is a, c, g, or t
  misc_feature (1210)..(1210): n is a, c, g, or t
  misc_feature (1212)..(1212): n is a, c, g, or t
  misc_feature (1214)..(1215): n is a, c, g, or t
  misc_feature (1217)..(1217): n is a, c, g, or t
  misc_feature (1223)..(1223): n is a, c, g, or t
  misc_feature (1229)..(1229): n is a, c, g, or t
  misc_feature (1237)..(1237): n is a, c, g, or t
  misc_feature (1240)..(1240): n is a, c, g, or t
  misc_feature (1247)..(1247): n is a, c, g, or t
  misc_feature (1249)..(1249): n is a, c, g, or t
  misc_feature (1252)..(1254): n is a, c, g, or t
  misc_feature (1256)..(1258): n is a, c, g, or t
  misc_feature (1283)..(1283): n is a, c, g, or t
  misc_feature (1286)..(1290): n is a, c, g, or t
  misc_feature (1293)..(1295): n is a, c, g, or t
  misc_feature (1302)..(1308): n is a, c, g, or t
  misc_feature (1311)..(1311): n is a, c, g, or t
  misc_feature (1319)..(1319): n is a, c, g, or t
  misc_feature (1321)..(1322): n is a, c, g, or t
  misc_feature (1327)..(1328): n is a, c, g, or t
  misc_feature (1331)..(1333): n is a, c, g, or t
  misc_feature (1336)..(1336): n is a, c, g, or t
  misc_feature (1338)..(1338): n is a, c, g, or t
gagaaattactatgagaggatcgcatcaccatcaccatcacggatcctatttaggtgacactatagaatcgtcgacccacgcgtccgccagaatgcttcagaagaatggattacctttactgagcaaagtcaactagaggcggacaaggctatagaagttttgctcacagcacctacagggaaagcagctggcttactaagacagaaaactggtcttcatgcctacacactgtgtcaggtcaattatagcttctattcatggactcaaacaatgatgaccacaaacaaaccatggaaattttcttcggttagagttctggttgtggatgaagggagtttggtatctgtaggaatcttcaaatcggtcttaaatttattgtgtgagcactccaaactttctaagcttattatccttggtgacattagacagttacccagtattgaacctggtaacttgctgaaagatctttttgagactcttaagtcaagaaattgtgctattgagctaaagacaaaccatagagcagaatctcagctcattgtggacaatgctacaagaatctcaagacgccaatttccaaaatttgatgcagaactaaatatctctgataatccaacattacccatctcaattcaagataagacatttatttttgtcaggctcccagaagaggatgccagttctcagtcatctaaaactaatcatcactcttgtttatattctgcagttaaaactttactacaagaaaataacttacaaaatgcaaaaacatcacaatttattgcatttagaaggcaagactgtgatctaattaatgactgctgctgcaaacactacacaggccacctcaccaaagaccatcagagtanacttgtttttggaattggggataaaatttgttgtaccaggaatgcatacctctcaaacttactacctgaaaatatctctggaagtcagcaaaataatgatctanatgccngtantgaanacttttcngggacncttccngnattttgctaaaanaancgngactttgaaagnaacgttcnacnngcaatggaaaaanattttccnaacaaangaggnaccngangnaacntttggaaanaaaaaatccttgnacnttaanaaaanggnnggggccgggaaanaacngggggaatttaaaaaancaaaggaaaattgncccnnaaaannggnnngggnnanancnntncccccnttttcnggggcccnaanaacaaananttnnntnnngggggggaaggggggcccccccccnggnnnnngtnnnccccccnnnnnnnggncccccccnanngtttnnttnnnagnancccc

SEQ ID NO: 197 - DNA, 1452 bp, Homo Sapiens
  misc_feature (1)..(2): n is a, c, g, or t
  misc_feature (580)..(580): n is a, c, g, or t
  misc_feature (586)..(586): n is a, c, g, or t
  misc_feature (589)..(589): n is a, c, g, or t
  misc_feature (627)..(627): n is a, c, g, or t
  misc_feature (631)..(631): n is a, c, g, or t
  misc_feature (641)..(641): n is a, c, g, or t
  misc_feature (656)..(656): n is a, c, g, or t
  misc_feature (673)..(673): n is a, c, g, or t
  misc_feature (679)..(679): n is a, c, g, or t
  misc_feature (686)..(686): n is a, c, g, or t
  misc_feature (706)..(706): n is a, c, g, or t
  misc_feature (712)..(712): n is a, c, g, or t
  misc_feature (723)..(723): n is a, c, g, or t
  misc_feature (768)..(768): n is a, c, g, or t
  misc_feature (779)..(779): n is a, c, g, or t
  misc_feature (789)..(790): n is a, c, g, or t
  misc_feature (795)..(795): n is a, c, g, or t
  misc_feature (801)..(801): n is a, c, g, or t
  misc_feature (803)..(803): n is a, c, g, or t
  misc_feature (809)..(810): n is a, c, g, or t
  misc_feature (812)..(812): n is a, c, g, or t
  misc_feature (815)..(815): n is a, c, g, or t
  misc_feature (829)..(829): n is a, c, g, or t
  misc_feature (837)..(837): n is a, c, g, or t
  misc_feature (848)..(848): n is a, c, g, or t
  misc_feature (853)..(854): n is a, c, g, or t
  misc_feature (857)..(857): n is a, c, g, or t
  misc_feature (861)..(861): n is a, c, g, or t
  misc_feature (874)..(874): n is a, c, g, or t
  misc_feature (881)..(881): n is a, c, g, or t
  misc_feature (886)..(886): n is a, c, g, or t
  misc_feature (892)..(892): n is a, c, g, or t
  misc_feature (895)..(896): n is a, c, g, or t
  misc_feature (899)..(899): n is a, c, g, or t
  misc_feature (902)..(902): n is a, c, g, or t
  misc_feature (904)..(904): n is a, c, g, or t
  misc_feature (908)..(908): n is a, c, g, or t
  misc_feature (910)..(911): n is a, c, g, or t
  misc_feature (914)..(915): n is a, c, g, or t
  misc_feature (917)..(917): n is a, c, g, or t
  misc_feature (922)..(922): n is a, c, g, or t
  misc_feature (927)..(927): n is a, c, g, or t
  misc_feature (929)..(930): n is a, c, g, or t
  misc_feature (932)..(932): n is a, c, g, or t
  misc_feature (934)..(934): n is a, c, g, or t
  misc_feature (936)..(937): n is a, c, g, or t
  misc_feature (943)..(943): n is a, c, g, or t
  misc_feature (959)..(959): n is a, c, g, or t
  misc_feature (966)..(966): n is a, c, g, or t
  misc_feature (969)..(969): n is a, c, g, or t
  misc_feature (981)..(981): n is a, c, g, or t
  misc_feature (992)..(992): n is a, c, g, or t
  misc_feature (996)..(996): n is a, c, g, or t
  misc_feature (998)..(998): n is a, c, g, or t
  misc_feature (1013)..(1013): n is a, c, g, or t
  misc_feature (1017)..(1017): n is a, c, g, or t
  misc_feature (1022)..(1022): n is a, c, g, or t
  misc_feature (1029)..(1029): n is a, c, g, or t
  misc_feature (1031)..(1031): n is a, c, g, or t
  misc_feature (1043)..(1044): n is a, c, g, or t
  misc_feature (1048)..(1048): n is a, c, g, or t
  misc_feature (1055)..(1060): n is a, c, g, or t
  misc_feature (1068)..(1068): n is a, c, g, or t
  misc_feature (1090)..(1090): n is a, c, g, or t
  misc_feature (1112)..(1112): n is a, c, g, or t
  misc_feature (1123)..(1123): n is a, c, g, or t
  misc_feature (1125)..(1125): n is a, c, g, or t
  misc_feature (1129)..(1129): n is a, c, g, or t
  misc_feature (1131)..(1131): n is a, c, g, or t
  misc_feature (1134)..(1134): n is a, c, g, or t
  misc_feature (1136)..(1136): n is a, c, g, or t
  misc_feature (1144)..(1146): n is a, c, g, or t
  misc_feature (1149)..(1149): n is a, c, g, or t
  misc_feature (1151)..(1152): n is a, c, g, or t
  misc_feature (1160)..(1160): n is a, c, g, or t
  misc_feature (1164)..(1164): n is a, c, g, or t
  misc_feature (1166)..(1166): n is a, c, g, or t
  misc_feature (1170)..(1170): n is a, c, g, or t
  misc_feature (1177)..(1177): n is a, c, g, or t
  misc_feature (1182)..(1182): n is a, c, g, or t
  misc_feature (1191)..(1192): n is a, c, g, or t
  misc_feature (1195)..(1195): n is a, c, g, or t
  misc_feature (1200)..(1200): n is a, c, g, or t
  misc_feature (1207)..(1207): n is a, c, g, or t
  misc_feature (1220)..(1220): n is a, c, g, or t
  misc_feature (1223)..(1223): n is a, c, g, or t
  misc_feature (1230)..(1231): n is a, c, g, or t
  misc_feature (1234)..(1234): n is a, c, g, or t
  misc_feature (1236)..(1236): n is a, c, g, or t
  misc_feature (1241)..(1241): n is a, c, g, or t
  misc_feature (1243)..(1243): n is a, c, g, or t
  misc_feature (1247)..(1247): n is a, c, g, or t
  misc_feature (1253)..(1253): n is a, c, g, or t
  misc_feature (1255)..(1256): n is a, c, g, or t
  misc_feature (1258)..(1259): n is a, c, g, or t
  misc_feature (1261)..(1261): n is a, c, g, or t
  misc_feature (1263)..(1263): n is a, c, g, or t
  misc_feature (1265)..(1265): n is a, c, g, or t
  misc_feature (1270)..(1270): n is a, c, g, or t
  misc_feature (1276)..(1276): n is a, c, g, or t
  misc_feature (1280)..(1280): n is a, c, g, or t
  misc_feature (1282)..(1282): n is a, c, g, or t
  misc_feature (1290)..(1290): n is a, c, g, or t
  misc_feature (1298)..(1300): n is a, c, g, or t
  misc_feature (1302)..(1302): n is a, c, g, or t
  misc_feature (1308)..(1308): n is a, c, g, or t
  misc_feature (1312)..(1312): n is a, c, g, or t
  misc_feature (1315)..(1315): n is a, c, g, or t
  misc_feature (1320)..(1320): n is a, c, g, or t
  misc_feature (1322)..(1322): n is a, c, g, or t
  misc_feature (1327)..(1327): n is a, c, g, or t
  misc_feature (1332)..(1332): n is a, c, g, or t
  misc_feature (1347)..(1347): n is a, c, g, or t
  misc_feature (1349)..(1349): n is a, c, g, or t
  misc_feature (1353)..(1354): n is a, c, g, or t
  misc_feature (1358)..(1358): n is a, c, g, or t
  misc_feature (1362)..(1365): n is a, c, g, or t
  misc_feature (1370)..(1370): n is a, c, g, or t
  misc_feature (1378)..(1379): n is a, c, g, or t
  misc_feature (1386)..(1386): n is a, c, g, or t
  misc_feature (1388)..(1388): n is a, c, g, or t
  misc_feature (1391)..(1392): n is a, c, g, or t
  misc_feature (1397)..(1397): n is a, c, g, or t
  misc_feature (1402)..(1402): n is a, c, g, or t
  misc_feature (1407)..(1407): n is a, c, g, or t
  misc_feature (1415)..(1417): n is a, c, g, or t
  misc_feature (1421)..(1421): n is a, c, g, or t
  misc_feature (1424)..(1424): n is a, c, g, or t
  misc_feature (1427)..(1429): n is a, c, g, or t
  misc_feature (1432)..(1434): n is a, c, g, or t
  misc_feature (1436)..(1436): n is a, c, g, or t
  misc_feature (1445)..(1445): n is a, c, g, or t
  misc_feature (1447)..(1448): n is a, c, g, or t
nntagagagattactatgagaggatcgcatcaccatcaccatcacggatcctatttaggtgacactatagaatcgtcgacccacgcgtccgcgactcgtcgccattcccggagcaggtcggcctcggcccaggggcgagtatccgttgctgtgtcggagacactagtccccgacaccgagacagccagccctctcccctgcctcgcggcgggagagcgtgtccggccggccggccggcggggctcgcgcaacctccctcgcctccccttcccccgcagcctccgccccgccaggcccggcccggactcccgagccccggcctcctcgtcctcggtcgccgctgccgccgggcttaacagccccgtccgccgcttctcttcctagtttgagaagccaaggaaggaaacagggaaaaatgtcgccatgaaggccgagaaccgctgccgccgccgacccccgccggccctgaacgccatgagcctgggtccccgccgcgcccgctccgctccgactgccgtcgccgccgaggcccccgttgatgccgctgagctcccccaacgccgccgccaccgcctccganatgganaanaacagcggctccaacagctcctccgcctcttcgggcancagnaaagggcaanagccgccccgctccncctcggcggggccagcntgcgantctaaanccaagagcgatggaaagaanttccantggatccaagngttataatcgcaaacgtgaacttttcctaccccaaaaatgaaaanttttaacaacnagtcccgtcnnctcangttcananaaaagnnangantttttaaaaagaangcctcctnaaagggggctngcggnnagnaagnaaaaatcttttanctctttnttttnaatggntgnnaanacnanatgnanntannanaaggnttcangnngnananntttaanccctgcccaaattttntggtccnaanaaaataaaactnaaaacaatttntttnanatttcatttttaaancccnggatnaaaaagntnaaatttttaaannaatnataattnnnnnntatggaanaaaaaaaaaaaaatggggaaanaaaaacttttttaaaaaagaanattttttttananggcnantananaatattgnnnttntnnaaaaaaanaaananttantttttgntaaanagaataatnnatnaatgnatttttnaaaaaaggtcatnttntaatatnnagntntcttncnaatnttcctntnnannanananaaaanaatagnttgnancaaattantgggtgannntntatatnattnagntaaananataanaatancatattattttctantnaaannaaanattnnnntaaanacatatannttttttnanttnnatatntaaantatanaattgagnnntttncancannnaannnanatttatttnannaata

SEQ ID NO: 198 - DNA, 1200 bp, Homo Sapiens
  misc_feature (759)..(759): n is a, c, g, or t
  misc_feature (781)..(781): n is a, c, g, or t
  misc_feature (932)..(932): n is a, c, g, or t
  misc_feature (985)..(986): n is a, c, g, or t
  misc_feature (988)..(988): n is a, c, g, or t
  misc_feature (1013)..(1013): n is a, c, g, or t
  misc_feature (1023)..(1023): n is a, c, g, or t
  misc_feature (1026)..(1026): n is a, c, g, or t
  misc_feature (1049)..(1049): n is a, c, g, or t
  misc_feature (1055)..(1055): n is a, c, g, or t
  misc_feature (1060)..(1060): n is a, c, g, or t
  misc_feature (1069)..(1069): n is a, c, g, or t
  misc_feature (1072)..(1072): n is a, c, g, or t
  misc_feature (1091)..(1091): n is a, c, g, or t
  misc_feature (1093)..(1093): n is a, c, g, or t
  misc_feature (1101)..(1101): n is a, c, g, or t
  misc_feature (1107)..(1107): n is a, c, g, or t
  misc_feature (1124)..(1124): n is a, c, g, or t
  misc_feature (1130)..(1130): n is a, c, g, or t
  misc_feature (1143)..(1143): n is a, c, g, or t
  misc_feature (1151)..(1151): n is a, c, g, or t
  misc_feature (1156)..(1156): n is a, c, g, or t
  misc_feature (1159)..(1159): n is a, c, g, or t
  misc_feature (1167)..(1167): n is a, c, g, or t
  misc_feature (1178)..(1178): n is a, c, g, or t
  misc_feature (1190)..(1190): n is a, c, g, or t
tagagagattaactatgagaggatcgcatcaccatcaccatcacggatcctatttaggtgacactatagaatcgtcgacccacgcgtccgcccacgcgtccgggagcacctgcacctggagtctacccagggccacccagcggccctggggcctacccatcttctggacagccaagtgccaccggagcctaccctgccactggcccctatggcgcccctgctgggccactgattgtgccttataacctgcctttgcctgggggagtggtgcctcgcatgctgataacaattctgggcacggtgaagcccaatgcaaacagaattgctttagatttccaaagagggaatgatgttgccttccactttaacccacgcttcaatgagaacaacaggagagtcattgtttgcaatacaaagctggataataactggggaagggaagaaagacagtcggttttcccatttgaaagtgggaaaccattcaaaatacaagtactggttgaacctgaccacttcaaggttgcagtgaatgatgctcacttgttgcagtacaatcatcgggttaaaaaactcaatgaaatcagcaaactgggaatttctggtgacatagacctcaccagtgcttcatataccatgatataatctgaaaggggcagattaaaaaaaaaaaaaaaagggcggccgctccctatagtgagtcgtattaagcttaattagctgagcttggactcctgttgatagatccagtaatgacctcanaactccatctggatttgttcanaacgctcggttgccgccgggcgttttttattggtgagaatccaagctagcttggcgagattttcaggagctaaggaagctaaaatggaaaaaaaaaatcactggatataccaccgttgatatatcccaatggcatcgtaaagaacattttngaggcatttcagtcagttgctcaatgtacctataaccaaaccgttcactgganntnacggccttttttaaaaaccgtaaanaaaaaaaaancanaagttttacccggcctttattcnattctngcccncctgagaangcncatccggaatttctatggnantgaaaaangggganctggggaaatgggaaanggttcncccttgttacccngttttccnagaanaantgaaaacntttttcccctntggaggaaaacnccaaaaattc

SEQ ID NO: 199 - DNA, 1269 bp, Homo Sapiens
  misc_feature (610)..(610): n is a, c, g, or t
  misc_feature (711)..(711): n is a, c, g, or t
  misc_feature (726)..(726): n is a, c, g, or t
  misc_feature (743)..(743): n is a, c, g, or t
  misc_feature (768)..(768): n is a, c, g, or t
  misc_feature (776)..(776): n is a, c, g, or t
  misc_feature (778)..(778): n is a, c, g, or t
  misc_feature (782)..(782): n is a, c, g, or t
  misc_feature (793)..(793): n is a, c, g, or t
  misc_feature (796)..(796): n is a, c, g, or t
  misc_feature (799)..(799): n is a, c, g, or t
  misc_feature (802)..(802): n is a, c, g, or t
  misc_feature (809)..(809): n is a, c, g, or t
  misc_feature (821)..(821): n is a, c, g, or t
  misc_feature (826)..(826): n is a, c, g, or t
  misc_feature (831)..(831): n is a, c, g, or t
  misc_feature (834)..(834): n is a, c, g, or t
  misc_feature (836)..(836): n is a, c, g, or t
  misc_feature (846)..(846): n is a, c, g, or t
  misc_feature (857)..(857): n is a, c, g, or t
  misc_feature (863)..(863): n is a, c, g, or t
  misc_feature (871)..(872): n is a, c, g, or t
  misc_feature (875)..(876): n is a, c, g, or t
  misc_feature (880)..(882): n is a, c, g, or t
  misc_feature (888)..(890): n is a, c, g, or t
  misc_feature (893)..(893): n is a, c, g, or t
  misc_feature (896)..(896): n is a, c, g, or t
  misc_feature (898)..(900): n is a, c, g, or t
  misc_feature (905)..(905): n is a, c, g, or t
  misc_feature (912)..(912): n is a, c, g, or t
  misc_feature (915)..(915): n is a, c, g, or t
  misc_feature (917)..(918): n is a, c, g, or t
  misc_feature (921)..(921): n is a, c, g, or t
  misc_feature (923)..(924): n is a, c, g, or t
  misc_feature (926)..(926): n is a, c, g, or t
  misc_feature (928)..(928): n is a, c, g, or t
  misc_feature (930)..(933): n is a, c, g, or t
  misc_feature (937)..(937): n is a, c, g, or t
  misc_feature (939)..(940): n is a, c, g, or t
  misc_feature (943)..(943): n is a, c, g, or t
  misc_feature (945)..(946): n is a, c, g, or t
  misc_feature (950)..(956): n is a, c, g, or t
  misc_feature (958)..(964): n is a, c, g, or t
  misc_feature (967)..(973): n is a, c, g, or t
  misc_feature (975)..(978): n is a, c, g, or t
  misc_feature (980)..(986): n is a, c, g, or t
  misc_feature (988)..(993): n is a, c, g, or t
  misc_feature (995)..(997): n is a, c, g, or t
  misc_feature (1005)..(1006): n is a, c, g, or t
  misc_feature (1013)..(1034): n is a, c, g, or t
  misc_feature (1036)..(1041): n is a, c, g, or t
  misc_feature (1044)..(1052): n is a, c, g, or t
  misc_feature (1056)..(1092): n is a, c, g, or t
  misc_feature (1094)..(1094): n is a, c, g, or t
  misc_feature (1097)..(1099): n is a, c, g, or t
  misc_feature (1101)..(1112): n is a, c, g, or t
  misc_feature (1114)..(1114): n is a, c, g, or t
  misc_feature (1117)..(1124): n is a, c, g, or t
  misc_feature (1127)..(1127): n is a, c, g, or t
  misc_feature (1130)..(1269): n is a, c, g, or t
aattagagaaattactatgagaggatcgcatcaccatcaccatcacggtatcctatttaggtgacactatagaatcgtcgacccacgcgtccggggtgtttgagggcccctataaggagtaccatgaggaagcccagaagtgggaccgctacactgaccctgtacccagccctcggcctggctcgtgcattaacaactggcatcggcgccacggctacaccagctccctggagctacccgacaacatcctcaacttcgtcaagaagcacccgctgatggaggagcaggtggggcctcggtggagccgccccctgctcgtgaagaagggcaccaacttcacccacctggtggccgaccgggttacaggacttgatggagccacctatacagtgctgttcattggcacaggagacggctggctgctcaaggctgtgagcctggggccctgggttcacctgattgaggagctgcagctgtttgaccaggagcccatgagaagcctggtgctatctcagagcaagaagctgctctttgccggctcccgctctcagctggtgcagctgcccgtggccgactgcatgaagtatcgctcctgtgcagactgtgtccntcgcccgggaaccctattgcgcctggaacgtcaacaccagccgctgtgtggccgtgggtggccactctggatctctactgatccaacatgtgatgacctcngacacttcaggcatntgcaaccttcgtggcantaaaaaaaatcaaggcccactcccnaaaaaatnangggnggtggcggggnaanaanttngtggttnccctgcaacttntcctncaaanttngnccatgccccnctggaactttngggggnccgggaanntgnnttgnnnaaaaannnccnggntnnntttcnttttaanaanannccngnntncnannnncctngnnttntnnaaannnnnnncnnnnnnnccnnnnnnntnnnngnnnnnnnannnnnntnnntttttttnnaaaaaannnnnnnnnnnnnnnnnnnnnntnnnnnnaannnnnnnnntttnnnnnnnnnnnnnnnnnnnnnnnnnnnnnnnnnnnnntnttnnnannnnnnnnnnnncnccnnnnnnnnaanaannnnnnnnnnnnnnnnnnnnnnnnnnnnnnnnnnnnnnnnnnnnnnnnnnnnnnnnnnnnnnnnnnnnnnnnnnnnnnnnnnnnnnnnnnnnnnnnnnnnnnnnnnnnnnnnnnnnnnnnnnnnnnnnnnnnnnnnnnnn

SEQ ID NO: 200 - DNA, 1347 bp, Homo Sapiens
  misc_feature (4)..(4): n is a, c, g, or t
  misc_feature (812)..(812): n is a, c, g, or t
  misc_feature (823)..(823): n is a, c, g, or t
  misc_feature (840)..(840): n is a, c, g, or t
  misc_feature (865)..(865): n is a, c, g, or t
  misc_feature (892)..(893): n is a, c, g, or t
  misc_feature (895)..(928): n is a, c, g, or t
  misc_feature (937)..(937): n is a, c, g, or t
  misc_feature (942)..(942): n is a, c, g, or t
  misc_feature (945)..(945): n is a, c, g, or t
  misc_feature (948)..(948): n is a, c, g, or t
  misc_feature (950)..(950): n is a, c, g, or t
  misc_feature (954)..(954): n is a, c, g, or t
  misc_feature (956)..(956): n is a, c, g, or t
  misc_feature (962)..(962): n is a, c, g, or t
  misc_feature (970)..(970): n is a, c, g, or t
  misc_feature (972)..(973): n is a, c, g, or t
  misc_feature (976)..(976): n is a, c, g, or t
  misc_feature (984)..(984): n is a, c, g, or t
  misc_feature (994)..(994): n is a, c, g, or t
  misc_feature (997)..(997): n is a, c, g, or t
  misc_feature (1002)..(1002): n is a, c, g, or t
  misc_feature (1005)..(1005): n is a, c, g, or t
  misc_feature (1007)..(1007): n is a, c, g, or t
  misc_feature (1015)..(1015): n is a, c, g, or t
  misc_feature (1025)..(1025): n is a, c, g, or t
  misc_feature (1028)..(1029): n is a, c, g, or t
  misc_feature (1045)..(1045): n is a, c, g, or t
  misc_feature (1047)..(1047): n is a, c, g, or t
  misc_feature (1049)..(1051): n is a, c, g, or t
  misc_feature (1054)..(1054): n is a, c, g, or t
  misc_feature (1064)..(1065): n is a, c, g, or t
  misc_feature (1076)..(1076): n is a, c, g, or t
  misc_feature (1080)..(1080): n is a, c, g, or t
  misc_feature (1087)..(1087): n is a, c, g, or t
  misc_feature (1089)..(1089): n is a, c, g, or t
  misc_feature (1091)..(1091): n is a, c, g, or t
  misc_feature (1095)..(1095): n is a, c, g, or t
  misc_feature (1101)..(1101): n is a, c, g, or t
  misc_feature (1111)..(1111): n is a, c, g, or t
  misc_feature (1114)..(1114): n is a, c, g, or t
  misc_feature (1116)..(1117): n is a, c, g, or t
  misc_feature (1119)..(1119): n is a, c, g, or t
  misc_feature (1121)..(1121): n is a, c, g, or t
  misc_feature (1123)..(1123): n is a, c, g, or t
  misc_feature (1126)..(1127): n is a, c, g, or t
  misc_feature (1136)..(1136): n is a, c, g, or t
  misc_feature (1147)..(1147): n is a, c, g, or t
  misc_feature (1150)..(1151): n is a, c, g, or t
  misc_feature (1158)..(1161): n is a, c, g, or t
  misc_feature (1164)..(1164): n is a, c, g, or t
  misc_feature (1167)..(1167): n is a, c, g, or t
  misc_feature (1174)..(1174): n is a, c, g, or t
  misc_feature (1178)..(1178): n is a, c, g, or t
  misc_feature (1183)..(1184): n is a, c, g, or t
  misc_feature (1186)..(1187): n is a, c, g, or t
  misc_feature (1202)..(1202): n is a, c, g, or t
  misc_feature (1205)..(1205): n is a, c, g, or t
  misc_feature (1211)..(1217): n is a, c, g, or t
  misc_feature (1220)..(1222): n is a, c, g, or t
  misc_feature (1224)..(1225): n is a, c, g, or t
  misc_feature (1227)..(1230): n is a, c, g, or t
  misc_feature (1235)..(1235): n is a, c, g, or t
  misc_feature (1240)..(1242): n is a, c, g, or t
  misc_feature (1245)..(1248): n is a, c, g, or t
  misc_feature (1254)..(1254): n is a, c, g, or t
  misc_feature (1256)..(1257): n is a, c, g, or t
  misc_feature (1264)..(1264): n is a, c, g, or t
  misc_feature (1270)..(1271): n is a, c, g, or t
  misc_feature (1281)..(1282): n is a, c, g, or t
  misc_feature (1284)..(1285): n is a, c, g, or t
  misc_feature (1292)..(1295): n is a, c, g, or t
  misc_feature (1298)..(1299): n is a, c, g, or t
  misc_feature (1302)..(1304): n is a, c, g, or t
  misc_feature (1309)..(1309): n is a, c, g, or t
  misc_feature (1314)..(1315): n is a, c, g, or t
  misc_feature (1320)..(1322): n is a, c, g, or t
  misc_feature (1324)..(1324): n is a, c, g, or t
  misc_feature (1327)..(1327): n is a, c, g, or t
  misc_feature (1330)..(1330): n is a, c, g, or t
  misc_feature (1335)..(1335): n is a, c, g, or t
  misc_feature (1337)..(1338): n is a, c, g, or t
  misc_feature (1347)..(1347): n is a, c, g, or t
aaanttagagaaattactatgagaggatcgcatcaccatcaccatcacggatcctatttaggtgacactatagaatcgtcgacccacgcgtccgcctctggccagcgccaggcaggcagcgggggtggcagaggcctgggcctgagtcttctggctctgcctctccctggggacaggagggagcctgggggtgtgggtggggagccggccggccgtgacccagcgcctggctctgcccgcaggagtggacagtgcaatgaaggaagaagtgcagaggctgcagtccagggtggacctgctggaggagaagctgcagctggtgctggccccactgcacagcctggcctcgcaggcactggagcatgggctcccggaccccggcagcctcctggtgcactccttccagcagctcggccgcatcgactccctgagcgagcagatttccttcctggaggagcagctggggtcctgctcctgcaagaaagactcgtgactgcccagcgccccaggctggactgagcccctcacgccgccctgcagcccccatgcccctgcccaacatgctgggggtccagaagccacctcggggtgactgagcggaaggccaggcagggccttcctcctcttcctcctccccttcctcgggaggctccccagaccctggcatgggatgggctgggatcttctctgtgaatccacccctggctacccccaccctggctaccccaacggcatcccaaggccaggtgggccctcagctgagggaaggtacgagctccctgctggagcctgggacccatggcacaggccangcagcccggangctgggtggggcctcantggggggctgctgcctgacccccancacaataaaaatgaaacgtgaaaaaannannnnnnnnnnnnnnnnnnnnnnnnnnnnnnnnnngggcggccnctccntanaangnaatncnattaancttaaatnannttnaactttgnactcctgttnaanaaatncantnaagacctncaaaactccnatnnggaattttttaaaaancntnnnttncccccccggnnttttttttttngggnaaaaccnancntaantttggnaaaatttttnggnanntnangnaannttaaatggnaaaaaaaaaanccnnggaaaannnnccnttnaaaattncccnatggnntnnaaaaaaaattttttnggnattttnnnnnnnttnnnanngnnnnaaaanaaaannnttnnnngaaaanannccttttnaaaacnnaaaaaaaaannanntttttcnnnnttnnttnnnttttnccccnnaaaannncnccnaanttttnannaaaaaaaan

SEQ ID NO: 201 - DNA, 1200 bp, Homo Sapiens
  misc_feature (1)..(1): n is a, c, g, or t
  misc_feature (8)..(8): n is a, c, g, or t
  misc_feature (49)..(49): n is a, c, g, or t
  misc_feature (323)..(323): n is a, c, g, or t
  misc_feature (591)..(591): n is a, c, g, or t
  misc_feature (669)..(669): n is a, c, g, or t
  misc_feature (722)..(722): n is a, c, g, or t
  misc_feature (727)..(727): n is a, c, g, or t
  misc_feature (745)..(746): n is a, c, g, or t
  misc_feature (748)..(748): n is a, c, g, or t
  misc_feature (790)..(790): n is a, c, g, or t
  misc_feature (795)..(795): n is a, c, g, or t
  misc_feature (802)..(802): n is a, c, g, or t
  misc_feature (811)..(811): n is a, c, g, or t
  misc_feature (813)..(813): n is a, c, g, or t
  misc_feature (821)..(821): n is a, c, g, or t
  misc_feature (830)..(830): n is a, c, g, or t
  misc_feature (845)..(845): n is a, c, g, or t
  misc_feature (858)..(858): n is a, c, g, or t
  misc_feature (862)..(862): n is a, c, g, or t
  misc_feature (869)..(869): n is a, c, g, or t
  misc_feature (883)..(883): n is a, c, g, or t
  misc_feature (900)..(900): n is a, c, g, or t
  misc_feature (903)..(903): n is a, c, g, or t
  misc_feature (908)..(908): n is a, c, g, or t
  misc_feature (910)..(910): n is a, c, g, or t
  misc_feature (915)..(918): n is a, c, g, or t
  misc_feature (920)..(921): n is a, c, g, or t
  misc_feature (929)..(930): n is a, c, g, or t
  misc_feature (936)..(936): n is a, c, g, or t
  misc_feature (939)..(939): n is a, c, g, or t
  misc_feature (948)..(949): n is a, c, g, or t
  misc_feature (958)..(958): n is a, c, g, or t
  misc_feature (961)..(962): n is a, c, g, or t
  misc_feature (964)..(964): n is a, c, g, or t
  misc_feature (967)..(968): n is a, c, g, or t
  misc_feature (971)..(971): n is a, c, g, or t
  misc_feature (975)..(975): n is a, c, g, or t
  misc_feature (983)..(983): n is a, c, g, or t
  misc_feature (985)..(985): n is a, c, g, or t
  misc_feature (987)..(987): n is a, c, g, or t
  misc_feature (991)..(992): n is a, c, g, or t
  misc_feature (1003)..(1003): n is a, c, g, or t
  misc_feature (1016)..(1017): n is a, c, g, or t
  misc_feature (1022)..(1022): n is a, c, g, or t
  misc_feature (1030)..(1030): n is a, c, g, or t
  misc_feature (1036)..(1036): n is a, c, g, or t
  misc_feature (1045)..(1047): n is a, c, g, or t
  misc_feature (1050)..(1050): n is a, c, g, or t
  misc_feature (1052)..(1052): n is a, c, g, or t
  misc_feature (1054)..(1054): n is a, c, g, or t
  misc_feature (1061)..(1063): n is a, c, g, or t
  misc_feature (1067)..(1068): n is a, c, g, or t
  misc_feature (1070)..(1070): n is a, c, g, or t
  misc_feature (1072)..(1072): n is a, c, g, or t
  misc_feature (1076)..(1076): n is a, c, g, or t
  misc_feature (1081)..(1081): n is a, c, g, or t
  misc_feature (1086)..(1088): n is a, c, g, or t
  misc_feature (1090)..(1091): n is a, c, g, or t
  misc_feature (1095)..(1095): n is a, c, g, or t
  misc_feature (1114)..(1114): n is a, c, g, or t
  misc_feature (1120)..(1120): n is a, c, g, or t
  misc_feature (1123)..(1123): n is a, c, g, or t
  misc_feature (1126)..(1127): n is a, c, g, or t
  misc_feature (1133)..(1133): n is a, c, g, or t
  misc_feature (1144)..(1144): n is a, c, g, or t
  misc_feature (1146)..(1146): n is a, c, g, or t
  misc_feature (1152)..(1153): n is a, c, g, or t
  misc_feature (1158)..(1159): n is a, c, g, or t
  misc_feature (1162)..(1162): n is a, c, g, or t
  misc_feature (1171)..(1171): n is a, c, g, or t
  misc_feature (1178)..(1178): n is a, c, g, or t
  misc_feature (1183)..(1183): n is a, c, g, or t
  misc_feature (1188)..(1188): n is a, c, g, or t
  misc_feature (1197)..(1197): n is a, c, g, or t
nagagganattactatgagaggatcgcatcaccatcaccatcacggatnctatttaggtgacactatagaatcgtcgacccacgcgttccgcccacgcgtccggacgcgacggcgggccgcgcggcgcatttccgcctctggcgaatggctcgtctgtagtgcacgccgcgggcccagctgcgaccccggccccgcccccgggaccccggccatggacgaactgttccccctcatcttcccggcagagccagcccaggcctctggcccctatgtggagatcattgagcagcccaagcagcggggcatgcgcttccgctacaantgcgaggggcgctccgcgggcagcatcccaggcgagaggagcacagataccaccaagacccaccccaccatcaagatcaatggctacacaggaccagggacagtgcgcatctccctggtcaccaaggaccctcctcaccggcctcacccccacgagcttgtaagaaaggactgccgggatggcttctatgaggctgagctctgcccggaccgctgcatccacagtttccagaacctgggaatccagtgtgtgaagaagcgggacctgnagcaggctatcattcagcgcatccagaccaacaacaaccccttccaagttcctatagaagagcagcgtgaggactacnacctgaaatgctgtgcggctctgcttccaggtgacagtgcgggaacccatcangaaangccccctccgcctgcccnncngtcctttctcattcccatctttgacaatcgtgcccccaacantgccnaagctcnaaaatttgncnaagtgaancgaaacctntggcaagctgctttnggagggaatgaanatcnttcttantgttgtggacaagntgtcaaaaagaggacanttnaggtntnttttnnnngnngaccaagnntgggangcnccaaggttnnctttttctnaanntnaannggnaccnaacaaatngncntatnnttttccggaancctttctctaccnnaaaantccaaacntgcaanggtttcttnnncgntntntcccatnnnaatnncngnaggnacttnccaannngnnaaantctgtttacccatgtaaantctganaanctnntctaanatacaaaatantntttccnncattnnggnaaatatggnaaaagtnaaatntaaancttttaaanaat

SEQ ID NO: 202 - DNA, 1365 bp, Homo Sapiens
  misc_feature (1)..(1): n is a, c, g, or t
  misc_feature (815)..(815): n is a, c, g, or t
  misc_feature (882)..(882): n is a, c, g, or t
  misc_feature (938)..(938): n is a, c, g, or t
  misc_feature (962)..(962): n is a, c, g, or t
  misc_feature (964)..(964): n is a, c, g, or t
  misc_feature (978)..(978): n is a, c, g, or t
  misc_feature (988)..(988): n is a, c, g, or t
  misc_feature (1008)..(1008): n is a, c, g, or t
  misc_feature (1057)..(1058): n is a, c, g, or t
  misc_feature (1061)..(1061): n is a, c, g, or t
  misc_feature (1064)..(1064): n is a, c, g, or t
  misc_feature (1073)..(1073): n is a, c, g, or t
  misc_feature (1086)..(1086): n is a, c, g, or t
  misc_feature (1088)..(1088): n is a, c, g, or t
  misc_feature (1094)..(1094): n is a, c, g, or t
  misc_feature (1105)..(1105): n is a, c, g, or t
  misc_feature (1109)..(1109): n is a, c, g, or t
  misc_feature (1114)..(1114): n is a, c, g, or t
  misc_feature (1117)..(1117): n is a, c, g, or t
  misc_feature (1120)..(1120): n is a, c, g, or t
  misc_feature (1122)..(1122): n is a, c, g, or t
  misc_feature (1129)..(1129): n is a, c, g, or t
  misc_feature (1140)..(1140): n is a, c, g, or t
  misc_feature (1150)..(1150): n is a, c, g, or t
  misc_feature (1156)..(1156): n is a, c, g, or t
  misc_feature (1162)..(1162): n is a, c, g, or t
  misc_feature (1165)..(1165): n is a, c, g, or t
  misc_feature (1175)..(1175): n is a, c, g, or t
  misc_feature (1180)..(1180): n is a, c, g, or t
  misc_feature (1191)..(1191): n is a, c, g, or t
  misc_feature (1198)..(1198): n is a, c, g, or t
  misc_feature (1203)..(1203): n is a, c, g, or t
  misc_feature (1214)..(1214): n is a, c, g, or t
  misc_feature (1222)..(1222): n is a, c, g, or t
  misc_feature (1231)..(1231): n is a, c, g, or t
  misc_feature (1236)..(1237): n is a, c, g, or t
  misc_feature (1249)..(1249): n is a, c, g, or t
  misc_feature (1256)..(1256): n is a, c, g, or t
  misc_feature (1259)..(1259): n is a, c, g, or t
  misc_feature (1270)..(1270): n is a, c, g, or t
  misc_feature (1276)..(1276): n is a, c, g, or t
  misc_feature (1284)..(1285): n is a, c, g, or t
  misc_feature (1289)..(1289): n is a, c, g, or t
  misc_feature (1292)..(1292): n is a, c, g, or t
  misc_feature (1294)..(1294): n is a, c, g, or t
  misc_feature (1297)..(1297): n is a, c, g, or t
  misc_feature (1299)..(1299): n is a, c, g, or t
  misc_feature (1306)..(1306): n is a, c, g, or t
  misc_feature (1308)..(1308): n is a, c, g, or t
  misc_feature (1310)..(1311): n is a, c, g, or t
  misc_feature (1313)..(1313): n is a, c, g, or t
  misc_feature (1323)..(1323): n is a, c, g, or t
  misc_feature (1326)..(1329): n is a, c, g, or t
  misc_feature (1331)..(1331): n is a, c, g, or t
  misc_feature (1337)..(1338): n is a, c, g, or t
  misc_feature (1341)..(1341): n is a, c, g, or t
  misc_feature (1353)..(1358): n is a, c, g, or t
  misc_feature (1362)..(1362): n is a, c, g, or t
naatagagaaattactatgagaggatcgcatcaccatcaccatcacggatcctatttaggtgacactatagaatcgtcgacccacgcgtccggaagtacatccactcggccgggatcatccaccgggtaggtgcgaccgcagggtgagggtcgggtccagcagggctccgtcccagcctcctgtgctcacgctccgcgtgacctgcaggacctgaagcccagcaacgtggctgtgaacgaggactgtgagctcaggatcctggatttcgggctggcgcgccaggcggacgaggagatgaccggctatgtggccacgcgctggtaccgggcacctgagatcatgctcaactggatgcattacaaccaaacagtggatatctggtccgtgggctgcatcatggctgagctgctccagggcaaggccctcttcccgggaagcgactacattgaccagctgaagcgcatcatggaagtggtgggcacacccagccctgaggttctggcaaaaatctcctcggaacacgcccggacatatatccagtccctgccccccatgccccagaaggacctgagcagcatcttccgtggagccaaccccctggccatagacctccttggaaggatgctggtgctggacagtgaccagagggtcagtgcagctgaggcactggcccacgcctacttcagccagtaccacgaccccgaggatgagccagaggccgagccatatgatgagagcgttgaggccaaggagcgcacgctggaggagtggaaggagctcacttaccaggaagtcctcagcttcaagcccccanagccaccgaagccacctggcagcctggagattgagcagtgaggtgctgcccagcagccccctgaaancctgtggagggcttgggcctgcacccttccacagctggcctggtttcctcgagagncacctcccacactcctatggtcananactttctggcctangaacccctcnccttcaggaaaatctacacncatgttatgcatgcacaaacatgtgtgtacatgtgcttgccatgtgtannaantcngggcaaaantgtccctgggccnancttggncctcctgtccncttntgggnaanggncntttccantggaaactgantggggggtcnaaaaanccaaanggnttccctgggnaattnccctttttgtnccaggcnaaacnaaggaaggtcncctttggnttttttttntcccnnggttttttgaanaaccctnggnccggaacccgnaaaatnaaagaaanntccnggntnaantnccccccngnannanggggtttttnttnnnntnaacccnnttnaaaaaaaaaaannnnnncccnttg

SEQ ID NO: 203 - DNA, 1342 bp, Homo Sapiens
  misc_feature (808)..(808): n is a, c, g, or t
  misc_feature (823)..(823): n is a, c, g, or t
  misc_feature (859)..(859): n is a, c, g, or t
  misc_feature (861)..(861): n is a, c, g, or t
  misc_feature (866)..(866): n is a, c, g, or t
  misc_feature (879)..(879): n is a, c, g, or t
  misc_feature (887)..(887): n is a, c, g, or t
  misc_feature (897)..(897): n is a, c, g, or t
  misc_feature (918)..(918): n is a, c, g, or t
  misc_feature (947)..(947): n is a, c, g, or t
  misc_feature (952)..(952): n is a, c, g, or t
  misc_feature (969)..(969): n is a, c, g, or t
  misc_feature (974)..(974): n is a, c, g, or t
  misc_feature (981)..(981): n is a, c, g, or t
  misc_feature (991)..(991): n is a, c, g, or t
  misc_feature (997)..(997): n is a, c, g, or t
  misc_feature (1014)..(1014): n is a, c, g, or t
  misc_feature (1017)..(1018): n is a, c, g, or t
  misc_feature (1022)..(1022): n is a, c, g, or t
  misc_feature (1034)..(1034): n is a, c, g, or t
  misc_feature (1049)..(1050): n is a, c, g, or t
  misc_feature (1054)..(1054): n is a, c, g, or t
  misc_feature (1057)..(1057): n is a, c, g, or t
  misc_feature (1059)..(1059): n is a, c, g, or t
  misc_feature (1065)..(1065): n is a, c, g, or t
  misc_feature (1074)..(1074): n is a, c, g, or t
  misc_feature (1081)..(1083): n is a, c, g, or t
  misc_feature (1088)..(1089): n is a, c, g, or t
  misc_feature (1096)..(1096): n is a, c, g, or t
  misc_feature (1104)..(1105): n is a, c, g, or t
  misc_feature (1108)..(1108): n is a, c, g, or t
  misc_feature (1112)..(1112): n is a, c, g, or t
  misc_feature (1124)..(1124): n is a, c, g, or t
  misc_feature (1132)..(1132): n is a, c, g, or t
  misc_feature (1136)..(1136): n is a, c, g, or t
  misc_feature (1146)..(1147): n is a, c, g, or t
  misc_feature (1149)..(1149): n is a, c, g, or t
  misc_feature (1151)..(1152): n is a, c, g, or t
  misc_feature (1159)..(1159): n is a, c, g, or t
  misc_feature (1161)..(1161): n is a, c, g, or t
  misc_feature (1165)..(1166): n is a, c, g, or t
  misc_feature (1169)..(1169): n is a, c, g, or t
  misc_feature (1172)..(1172): n is a, c, g, or t
  misc_feature (1192)..(1192): n is a, c, g, or t
  misc_feature (1195)..(1198): n is a, c, g, or t
  misc_feature (1200)..(1201): n is a, c, g, or t
  misc_feature (1208)..(1208): n is a, c, g, or t
  misc_feature (1218)..(1218): n is a, c, g, or t
  misc_feature (1220)..(1223): n is a, c, g, or t
  misc_feature (1225)..(1229): n is a, c, g, or t
  misc_feature (1231)..(1235): n is a, c, g, or t
  misc_feature (1239)..(1244): n is a, c, g, or t
  misc_feature (1247)..(1248): n is a, c, g, or t
  misc_feature (1251)..(1251): n is a, c, g, or t
  misc_feature (1256)..(1259): n is a, c, g, or t
  misc_feature (1263)..(1263): n is a, c, g, or t
  misc_feature (1265)..(1265): n is a, c, g, or t
  misc_feature (1271)..(1271): n is a, c, g, or t
  misc_feature (1273)..(1274): n is a, c, g, or t
  misc_feature (1277)..(1278): n is a, c, g, or t
  misc_feature (1288)..(1292): n is a, c, g, or t
  misc_feature (1296)..(1299): n is a, c, g, or t
  misc_feature (1301)..(1320): n is a, c, g, or t
  misc_feature (1325)..(1328): n is a, c, g, or t
  misc_feature (1333)..(1342): n is a, c, g, or t
tagagaaattactatgagaggatcgcatcaccatcaccatcacggatcctatttaggtgacactatagaatcgtcgacccacgcgtccgggaccaggcagccactttcctggtgctctctgggcccagctggtgctgtagggccacgcaggcaggggcgtcaaggggtttctctgcccaaggaagacagaacatggagaaccgtcagggcaggaaccccacagactgtcccttccagcccacactctgccacctcctggccctgtcccaattctgagccaaggcctccccgaggcagaagttgcctggtcctctgtccccacagtgacctgactgggggtgagggagaaggaggagagagcccatgtgtggtgtgtgtgcccctgagaacttcgtggtgactgcctttgggagcccgcaggtggccagaggcaggggtagctgagttcctggagaccccttttttgcccccaggttccccagagggcaacgccatcagtagcagtgtggtgtttcaggcagagctctggccaggctgtgccagtgtgtcccggacgcatcactaaggaagagagagtttatttagtcaactggcccaaggcagcgaggcttctacagtcccacaccccatagccgcctgggctggggcttactgggggctgaaggttctggacatgaacaagggtcaggtagaagagaaaggcttcccctacaccccagcctcctgctgtcccctgaagcccaggactgcgttgtatgctttccatccactcaccttaccccatagcatcttgcggcccaaaaaccanagccatttgtctcanaccctaaatcaataatcacaaaccccaaaacgggananagcantgaaaacatgcanggctgtgnacgggggaanggttgtggcgggtgttctgangctgaaaagacacctatatgcgtatttcntctanacacatcaccccccttntatantcttaanccatgactancctggnggcgtgtaaatttctgnccnntttnaccccctcatgngcttcttctgaaaanngaangtnantgtttnaaaactggnaaaattnnnccccnnttattgnaaaaaaanntgnaaancttggaaatttntttttttnctgntttccaaagnntncnnaaaaaancnaaannttnaangggggggggggggggggggnaannnngnnccccccngggggggggntnnnngnnnnntnnnnntttnnnnnnggnnaanttttnnnntttntntttttntnnccnnaaaaaaaaannnnntttnnnntnnnnnnnnnnnnnnnnnnnnaaaannnnaaaannnnnnnnnn

SEQ ID NO: 204 - DNA, 1200 bp, Homo Sapiens
  misc_feature (1)..(2): n is a, c, g, or t
  misc_feature (310)..(310): n is a, c, g, or t
  misc_feature (323)..(323): n is a, c, g, or t
  misc_feature (357)..(357): n is a, c, g, or t
  misc_feature (378)..(378): n is a, c, g, or t
  misc_feature (388)..(388): n is a, c, g, or t
  misc_feature (399)..(399): n is a, c, g, or t
  misc_feature (414)..(414): n is a, c, g, or t
  misc_feature (446)..(446): n is a, c, g, or t
  misc_feature (455)..(455): n is a, c, g, or t
  misc_feature (485)..(485): n is a, c, g, or t
  misc_feature (514)..(514): n is a, c, g, or t
  misc_feature (517)..(517): n is a, c, g, or t
  misc_feature (520)..(521): n is a, c, g, or t
  misc_feature (536)..(536): n is a, c, g, or t
  misc_feature (546)..(548): n is a, c, g, or t
  misc_feature (558)..(558): n is a, c, g, or t
  misc_feature (564)..(565): n is a, c, g, or t
  misc_feature (567)..(567): n is a, c, g, or t
  misc_feature (582)..(582): n is a, c, g, or t
  misc_feature (594)..(594): n is a, c, g, or t
  misc_feature (597)..(597): n is a, c, g, or t
  misc_feature (601)..(601): n is a, c, g, or t
  misc_feature (607)..(607): n is a, c, g, or t
  misc_feature (609)..(610): n is a, c, g, or t
  misc_feature (614)..(614): n is a, c, g, or t
  misc_feature (621)..(621): n is a, c, g, or t
  misc_feature (634)..(635): n is a, c, g, or t
  misc_feature (648)..(649): n is a, c, g, or t
  misc_feature (655)..(656): n is a, c, g, or t
  misc_feature (661)..(661): n is a, c, g, or t
  misc_feature (670)..(670): n is a, c, g, or t
  misc_feature (674)..(674): n is a, c, g, or t
  misc_feature (677)..(677): n is a, c, g, or t
  misc_feature (681)..(681): n is a, c, g, or t
  misc_feature (683)..(684): n is a, c, g, or t
  misc_feature (690)..(690): n is a, c, g, or t
  misc_feature (693)..(693): n is a, c, g, or t
  misc_feature (695)..(695): n is a, c, g, or t
  misc_feature (699)..(699): n is a, c, g, or t
  misc_feature (705)..(705): n is a, c, g, or t
  misc_feature (708)..(708): n is a, c, g, or t
  misc_feature (713)..(713): n is a, c, g, or t
  misc_feature (715)..(715): n is a, c, g, or t
  misc_feature (719)..(721): n is a, c, g, or t
  misc_feature (724)..(724): n is a, c, g, or t
  misc_feature (728)..(728): n is a, c, g, or t
  misc_feature (732)..(733): n is a, c, g, or t
  misc_feature (745)..(745): n is a, c, g, or t
  misc_feature (747)..(747): n is a, c, g, or t
  misc_feature (750)..(750): n is a, c, g, or t
  misc_feature (754)..(754): n is a, c, g, or t
  misc_feature (757)..(759): n is a, c, g, or t
  misc_feature (767)..(767): n is a, c, g, or t
  misc_feature (771)..(771): n is a, c, g, or t
  misc_feature (776)..(778): n is a, c, g, or t
  misc_feature (782)..(782): n is a, c, g, or t
  misc_feature (784)..(785): n is a, c, g, or t
  misc_feature (787)..(787): n is a, c, g, or t
  misc_feature (791)..(791): n is a, c, g, or t
  misc_feature (794)..(794): n is a, c, g, or t
  misc_feature (798)..(798): n is a, c, g, or t
  misc_feature (800)..(800): n is a, c, g, or t
  misc_feature (802)..(802): n is a, c, g, or t
  misc_feature (807)..(807): n is a, c, g, or t
  misc_feature (810)..(812): n is a, c, g, or t
  misc_feature (815)..(815): n is a, c, g, or t
  misc_feature (823)..(823): n is a, c, g, or t
  misc_feature (831)..(831): n is a, c, g, or t
  misc_feature (834)..(834): n is a, c, g, or t
  misc_feature (840)..(840): n is a, c, g, or t
  misc_feature (845)..(845): n is a, c, g, or t
  misc_feature (848)..(849): n is a, c, g, or t
  misc_feature (856)..(856): n is a, c, g, or t
  misc_feature (858)..(858): n is a, c, g, or t
  misc_feature (862)..(862): n is a, c, g, or t
  misc_feature (874)..(874): n is a, c, g, or t
  misc_feature (878)..(878): n is a, c, g, or t
  misc_feature (891)..(891): n is a, c, g, or t
  misc_feature (905)..(905): n is a, c, g, or t
  misc_feature (910)..(910): n is a, c, g, or t
  misc_feature (914)..(915): n is a, c, g, or t
  misc_feature (919)..(919): n is a, c, g, or t
  misc_feature (923)..(925): n is a, c, g, or t
  misc_feature (934)..(935): n is a, c, g, or t
  misc_feature (944)..(944): n is a, c, g, or t
  misc_feature (946)..(947): n is a, c, g, or t
  misc_feature (954)..(955): n is a, c, g, or t
  misc_feature (958)..(959): n is a, c, g, or t
  misc_feature (964)..(966): n is a, c, g, or t
  misc_feature (968)..(968): n is a, c, g, or t
  misc_feature (971)..(975): n is a, c, g, or t
  misc_feature (978)..(978): n is a, c, g, or t
  misc_feature (981)..(981): n is a, c, g, or t
  misc_feature (983)..(983): n is a, c, g, or t
  misc_feature (985)..(985): n is a, c, g, or t
  misc_feature (987)..(988): n is a, c, g, or t
  misc_feature (991)..(992): n is a, c, g, or t
  misc_feature (997)..(997): n is a, c, g, or t
  misc_feature (1002)..(1002): n is a, c, g, or t
  misc_feature (1010)..(1010): n is a, c, g, or t
  misc_feature (1012)..(1012): n is a, c, g, or t
  misc_feature (1015)..(1016): n is a, c, g, or t
  misc_feature (1018)..(1018): n is a, c, g, or t
  misc_feature (1021)..(1021): n is a, c, g, or t
  misc_feature (1023)..(1023): n is a, c, g, or t
  misc_feature (1026)..(1027): n is a, c, g, or t
  misc_feature (1030)..(1032): n is a, c, g, or t
  misc_feature (1043)..(1043): n is a, c, g, or t
  misc_feature (1045)..(1046): n is a, c, g, or t
  misc_feature (1050)..(1050): n is a, c, g, or t
  misc_feature (1055)..(1055): n is a, c, g, or t
  misc_feature (1066)..(1066): n is a, c, g, or t
  misc_feature (1072)..(1072): n is a, c, g, or t
  misc_feature (1076)..(1076): n is a, c, g, or t
  misc_feature (1082)..(1082): n is a, c, g, or t
  misc_feature (1090)..(1090): n is a, c, g, or t
  misc_feature (1094)..(1095): n is a, c, g, or t
  misc_feature (1097)..(1097): n is a, c, g, or t
  misc_feature (1105)..(1105): n is a, c, g, or t
  misc_feature (1108)..(1108): n is a, c, g, or t
  misc_feature (1110)..(1111): n is a, c, g, or t
  misc_feature (1116)..(1117): n is a, c, g, or t
  misc_feature (1120)..(1120): n is a, c, g, or t
  misc_feature (1124)..(1124): n is a, c, g, or t
  misc_feature (1133)..(1133): n is a, c, g, or t
  misc_feature (1137)..(1137): n is a, c, g, or t
  misc_feature (1140)..(1141): n is a, c, g, or t
  misc_feature (1144)..(1145): n is a, c, g, or t
  misc_feature (1149)..(1149): n is a, c, g, or t
  misc_feature (1152)..(1152): n is a, c, g, or t
  misc_feature (1156)..(1156): n is a, c, g, or t
  misc_feature (1162)..(1162): n is a, c, g, or t
  misc_feature (1168)..(1169): n is a, c, g, or t
  misc_feature (1175)..(1175): n is a, c, g, or t
  misc_feature (1177)..(1177): n is a, c, g, or t
  misc_feature (1184)..(1185): n is a, c, g, or t
  misc_feature (1199)..(1199): n is a, c, g, or t
nntagagagaattactatgagaggatcgcatcaccatcaccatcacggtatcctatttaggtgacactatagaatcgtcgacccacgcgtccgcactttgggacgaactaggtcacgcgctccgcgggtcgggcacccccgcccgccaggcacggccgcggctccttcctcttcctgcccgcggtagtgggggtggggcaggcctcgggacacctgcctccgccgccggccgccggccgccgtcctcgcgcggcttcccgggcggctctgccccgaccgtagactcccggcccgctcgccgcggcagganccgtggttccgcngacctgggcgcgctctctccctggccactggganaccccccgcggcctcgcgggnaaaacctcgngactgccccgngcccccggccgtctntgcgtcgctccttctcgcccgcgaccgtggantcgtcctcncgagcctgggttggcggaagctgcaagggnccggggtcgcactacttggtgcgaaaggnccngcnntgggccagagggatncccgtccgcnnngtgagccgtntgggcnnanacggaaaggatccangaggatccgcantgngtanccaggnannaaantggatgncggcaaccaaccnnccgcgtacattcnngcaaanntcgcntgtttcccncggnagnccgnanncactcnagnanaaancacaanagnaactnanaatnnntgngaantaannaacttccagaancnacngttnttnnnaacgttgnaagncttcnnngaanannanaagnacnttgntnantttcncannnggntaattctngtcaattnttncccatnttccngannagaaacnangganttttttttttcnaaancctaagtaaaatnaaatcaaaaatttnaaaanatcnnttanatannnaattttcannaaaaatgananntttttannatnnaaaannnanaannnnnaanaantnancnnttnnaaatnaaatnaaacaccncnganntntantnttnnttnnnattgaagaatntnntaanaaaangaaatattatntaaaancctnatcatnctataaanatanntntataaatnaanannaaaanntantttntaaatattnaaanacnnttnntttnttnttcntttaantttatnnaaaaantnaaaaatnnaaactataaatcana

SEQ ID NO: 205 - DNA, 1260 bp, Homo Sapiens
  misc_feature (980)..(980): n is a, c, g, or t
  misc_feature (999)..(999): n is a, c, g, or t
  misc_feature (1036)..(1036): n is a, c, g, or t
  misc_feature (1039)..(1039): n is a, c, g, or t
  misc_feature (1046)..(1046): n is a, c, g, or t
  misc_feature (1055)..(1055): n is a, c, g, or t
  misc_feature (1060)..(1060): n is a, c, g, or t
  misc_feature (1063)..(1063): n is a, c, g, or t
  misc_feature (1082)..(1082): n is a, c, g, or t
  misc_feature (1094)..(1094): n is a, c, g, or t
  misc_feature (1096)..(1096): n is a, c, g, or t
  misc_feature (1101)..(1101): n is a, c, g, or t
  misc_feature (1114)..(1114): n is a, c, g, or t
  misc_feature (1123)..(1123): n is a, c, g, or t
  misc_feature (1126)..(1126): n is a, c, g, or t
  misc_feature (1129)..(1129): n is a, c, g, or t
  misc_feature (1137)..(1137): n is a, c, g, or t
  misc_feature (1141)..(1141): n is a, c, g, or t
  misc_feature (1147)..(1147): n is a, c, g, or t
  misc_feature (1156)..(1156): n is a, c, g, or t
  misc_feature (1173)..(1173): n is a, c, g, or t
  misc_feature (1180)..(1180): n is a, c, g, or t
  misc_feature (1184)..(1184): n is a, c, g, or t
  misc_feature (1186)..(1186): n is a, c, g, or t
  misc_feature (1200)..(1201): n is a, c, g, or t
  misc_feature (1203)..(1203): n is a, c, g, or t
  misc_feature (1213)..(1213): n is a, c, g, or t
  misc_feature (1220)..(1220): n is a, c, g, or t
  misc_feature (1222)..(1222): n is a, c, g, or t
  misc_feature (1224)..(1224): n is a, c, g, or t
  misc_feature (1232)..(1232): n is a, c, g, or t
  misc_feature (1236)..(1236): n is a, c, g, or t
  misc_feature (1238)..(1238): n is a, c, g, or t
  misc_feature (1242)..(1246): n is a, c, g, or t
  misc_feature (1249)..(1251): n is a, c, g, or t
  misc_feature (1257)..(1257): n is a, c, g, or t
tgagaaattactatgagaggatcgcatcaccatcaccatcacggatcctatttaggtgacactatagaatcgtcgacccacgcgtccgcttctacagctgaagccataggtttaaaaggaagttctcctactcccccttgttctccagtacaaccttcaaaacaactggaatatttagcaaggattcaaggctttcaggcagccttaagtgccttgaaacaattttctgaacaaggactggatccaatcgatggagcaatgaatatcgaaaaaggttctcttgaaaaacaagccaagcatctgagagagaaagcggacaataaccaggcacccccgggctccatcgctcaggactgcaagaaatcaaactcggccgtctagcagctcccagaacccgcggctgccaccgcatccttataaacctgtcagcacgcatgagggtgtctgtgttcagggaaatgaatgactaataccattatttgagtcttatgtgaagacaacactattctaacacgagagataatatacatggtactgtttattcaactggggaaaaataaaactttgagcatttcccttggaactcgagatcagatcataactcatttgcctagaggcagcagaaatctgatcctgctactggagcttaaaataacaagtaaagaaaagtgttagaaacaaagctaaaattttaacatgattaataatagagaagttgggtttggttctgttgttatgattgttttgtcgtggtgcttgtgttcagttatattctctctctctctcatttcaaatactgcttgacaattcgaaaatgaaccaatgatgtgctgtggaatgtgatggttgtcttcatatagagtcacatggtttctctttttatgcagatatttataatcttcatcctatatcagtaggaataactataaggtgcactacaaaaagatgtatgcaaacaaacatgttttaaatcaggtcanatatctgatgaaaaatacnaactaatgttaagagcaagtagtttcaacatactccnggnaactganaaaacaaancaaancanttgggggttttgagctccntatactcttacnangtaangggggcgtcttgnccctaaatntcntcntcccggantccncccccnggttggggnaaccccccccccccccntccgggngtgnanccccccccgggttnncnccaaaaaggnttttttngnancggccccnggantngggnnnnnggnnnagaatnaaa

SEQ ID NO: 206 - DNA, 1402 bp, Homo Sapiens
  misc_feature (759)..(759): n is a, c, g, or t
  misc_feature (781)..(781): n is a, c, g, or t
  misc_feature (900)..(900): n is a, c, g, or t
  misc_feature (918)..(918): n is a, c, g, or t
  misc_feature (928)..(928): n is a, c, g, or t
  misc_feature (942)..(942): n is a, c, g, or t
  misc_feature (988)..(988): n is a, c, g, or t
  misc_feature (996)..(996): n is a, c, g, or t
  misc_feature (998)..(998): n is a, c, g, or t
  misc_feature (1003)..(1003): n is a, c, g, or t
  misc_feature (1010)..(1010): n is a, c, g, or t
  misc_feature (1016)..(1016): n is a, c, g, or t
  misc_feature (1022)..(1022): n is a, c, g, or t
  misc_feature (1027)..(1028): n is a, c, g, or t
  misc_feature (1042)..(1042): n is a, c, g, or t
  misc_feature (1044)..(1044): n is a, c, g, or t
  misc_feature (1050)..(1050): n is a, c, g, or t
  misc_feature (1077)..(1078): n is a, c, g, or t
  misc_feature (1086)..(1086): n is a, c, g, or t
  misc_feature (1089)..(1090): n is a, c, g, or t
  misc_feature (1093)..(1093): n is a, c, g, or t
  misc_feature (1110)..(1110): n is a, c, g, or t
  misc_feature (1112)..(1112): n is a, c, g, or t
  misc_feature (1133)..(1133): n is a, c, g, or t
  misc_feature (1136)..(1136): n is a, c, g, or t
  misc_feature (1139)..(1139): n is a, c, g, or t
  misc_feature (1161)..(1161): n is a, c, g, or t
  misc_feature (1171)..(1171): n is a, c, g, or t
  misc_feature (1173)..(1173): n is a, c, g, or t
  misc_feature (1175)..(1175): n is a, c, g, or t
  misc_feature (1182)..(1182): n is a, c, g, or t
  misc_feature (1185)..(1185): n is a, c, g, or t
  misc_feature (1205)..(1205): n is a, c, g, or t
  misc_feature (1212)..(1212): n is a, c, g, or t
  misc_feature (1215)..(1215): n is a, c, g, or t
  misc_feature (1217)..(1219): n is a, c, g, or t
  misc_feature (1235)..(1235): n is a, c, g, or t
  misc_feature (1237)..(1237): n is a, c, g, or t
  misc_feature (1239)..(1240): n is a, c, g, or t
  misc_feature (1261)..(1261): n is a, c, g, or t
  misc_feature (1263)..(1263): n is a, c, g, or t
  misc_feature (1296)..(1296): n is a, c, g, or t
  misc_feature (1305)..(1305): n is a, c, g, or t
  misc_feature (1308)..(1308): n is a, c, g, or t
  misc_feature (1312)..(1315): n is a, c, g, or t
  misc_feature (1318)..(1318): n is a, c, g, or t
  misc_feature (1328)..(1328): n is a, c, g, or t
  misc_feature (1334)..(1334): n is a, c, g, or t
  misc_feature (1336)..(1336): n is a, c, g, or t
  misc_feature (1344)..(1344): n is a, c, g, or t
  misc_feature (1346)..(1346): n is a, c, g, or t
  misc_feature (1354)..(1354): n is a, c, g, or t
  misc_feature (1356)..(1356): n is a, c, g, or t
  misc_feature (1358)..(1359): n is a, c, g, or t
  misc_feature (1368)..(1368): n is a, c, g, or t
  misc_feature (1372)..(1372): n is a, c, g, or t
  misc_feature (1378)..(1378): n is a, c, g, or t
  misc_feature (1380)..(1380): n is a, c, g, or t
  misc_feature (1382)..(1382): n is a, c, g, or t
  misc_feature (1385)..(1385): n is a, c, g, or t
  misc_feature (1389)..(1390): n is a, c, g, or t
  misc_feature (1395)..(1396): n is a, c, g, or t
attagagagaattactatgagaggatcgcatcaccatcaccatcacggatcctatttaggtgacactatagaatcgtcgacccacgcgtccgggcgtgatgcacggctcccgcatcagctcaaagctgatcttgccacacaggtagtcggggatgtctcgcttctgtggcacaggggcacacggtcagaggctgaaaaggggcactgcacgagcacctgccagccatcggcagcaagcgacacacactcaccttcctcttctcatccacctgagaaaaaagctcgtccatgtccgccatgtacttgtcctgtgaagagttgagtgctgtgcttgggggagacaccccacctccctcctccatggggcacagacccaacacaaggcggggatgctcccacgccacgtgcacacacacagacccacatgtgggtggggggcaccctcacgtgcttggcctcaatgcaggcctgctgggcccggacgtggctgtcgtcctcatcaccctcgtggtttcgctggcactcttccagctccctgggggttgaccaggagccggtcagagatggacctggccagatgtctgaccacaccccaatctcagcgctaacatccacacttccccacatttcctgcttgccagtaaagccttcgataaaaaaaaaaaaaaaaaaaaagggcggccgctccctatagtgagtcgtattaagcttaattagctgagcttggactcctgttgatagatccagtaatgacctcanaactccatctggatttgttcanaacgctcggttgccgccgggcgttttttattggtgagaatccaagctagcttggcgagattttcaggagctaaggaagctaaaatggagaaaaaaatcactggatataccaccgttganatatccccaatggcatcntaaagaacanttttgaggcatttncagtcagttgctcaatgtacctataaccaaaccgttcaactggaanattacggncnttttnaaaaacngtaaanaaaaanaagcnnaagttttatccggncntttatnacattcttgcccgcctgaaaaatgccnntccggaanttnntanggcaatgaaaaaaggtnanctgggaaatggaaaaagttcnccnttnttaaccgttttcatgaaaaaangaaaattttntncnccttggnaanaaaacccaaaaaatttcggngattttnaanannntttccaaaaggggggntnannggaaaaccttgcctatttccnanggtttttaaaaaatttttttccccccccacccngggaatttncantttnnnnaangggcaaaaanaaattntncccctttntngggaaatnananngaaaggggnaccnggaaantntnccnttgnntttcnnaaaaaa

SEQ ID NO: 207 - DNA, 1373 bp, Homo Sapiens
  misc_feature (882)..(882): n is a, c, g, or t
  misc_feature (931)..(931): n is a, c, g, or t
  misc_feature (942)..(942): n is a, c, g, or t
  misc_feature (956)..(956): n is a, c, g, or t
  misc_feature (958)..(958): n is a, c, g, or t
  misc_feature (975)..(975): n is a, c, g, or t
  misc_feature (978)..(978): n is a, c, g, or t
  misc_feature (995)..(995): n is a, c, g, or t
  misc_feature (1035)..(1035): n is a, c, g, or t
  misc_feature (1042)..(1042): n is a, c, g, or t
  misc_feature (1050)..(1050): n is a, c, g, or t
  misc_feature (1058)..(1058): n is a, c, g, or t
  misc_feature (1071)..(1071): n is a, c, g, or t
  misc_feature (1081)..(1081): n is a, c, g, or t
  misc_feature (1087)..(1087): n is a, c, g, or t
  misc_feature (1100)..(1100): n is a, c, g, or t
  misc_feature (1102)..(1102): n is a, c, g, or t
  misc_feature (1105)..(1105): n is a, c, g, or t
  misc_feature (1111)..(1111): n is a, c, g, or t
  misc_feature (1123)..(1123): n is a, c, g, or t
  misc_feature (1132)..(1132): n is a, c, g, or t
  misc_feature (1136)..(1136): n is a, c, g, or t
  misc_feature (1146)..(1147): n is a, c, g, or t
  misc_feature (1161)..(1161): n is a, c, g, or t
  misc_feature (1163)..(1163): n is a, c, g, or t
  misc_feature (1177)..(1178): n is a, c, g, or t
  misc_feature (1187)..(1187): n is a, c, g, or t
  misc_feature (1191)..(1191): n is a, c, g, or t
  misc_feature (1199)..(1199): n is a, c, g, or t
  misc_feature (1201)..(1201): n is a, c, g, or t
  misc_feature (1205)..(1205): n is a, c, g, or t
  misc_feature (1207)..(1207): n is a, c, g, or t
  misc_feature (1210)..(1211): n is a, c, g, or t
  misc_feature (1215)..(1215): n is a, c, g, or t
  misc_feature (1219)..(1219): n is a, c, g, or t
  misc_feature (1222)..(1222): n is a, c, g, or t
  misc_feature (1224)..(1224): n is a, c, g, or t
  misc_feature (1229)..(1229): n is a, c, g, or t
  misc_feature (1232)..(1232): n is a, c, g, or t
  misc_feature (1235)..(1235): n is a, c, g, or t
  misc_feature (1238)..(1238): n is a, c, g, or t
  misc_feature (1246)..(1247): n is a, c, g, or t
  misc_feature (1275)..(1275): n is a, c, g, or t
  misc_feature (1281)..(1281): n is a, c, g, or t
  misc_feature (1290)..(1290): n is a, c, g, or t
  misc_feature (1302)..(1302): n is a, c, g, or t
  misc_feature (1304)..(1304): n is a, c, g, or t
  misc_feature (1306)..(1306): n is a, c, g, or t
  misc_feature (1309)..(1309): n is a, c, g, or t
  misc_feature (1319)..(1319): n is a, c, g, or t
  misc_feature (1321)..(1321): n is a, c, g, or t
  misc_feature (1329)..(1329): n is a, c, g, or t
  misc_feature (1333)..(1334): n is a, c, g, or t
  misc_feature (1338)..(1338): n is a, c, g, or t
  misc_feature (1341)..(1341): n is a, c, g, or t
  misc_feature (1344)..(1344): n is a, c, g, or t
  misc_feature (1351)..(1351): n is a, c, g, or t
  misc_feature (1360)..(1361): n is a, c, g, or t
  misc_feature (1363)..(1365): n is a, c, g, or t
  misc_feature (1373)..(1373): n is a, c, g, or t
atagagaaattactatgagaggatcgcatcaccatcaccatcacggatcctatttaggtgacactatagaatcgtcgacccacgcgtccgcccacgcgtccgccctcatccacgatggcctagcacgtggaattcgcgaagctgccaaagccttagacaagcgccaagcccatctttgtgtgcttgcatccaactgtgatgagcctatgtatgtcaagttggtggaggccctttgtgctgaacaccaaatcaacctaattaaggttgatgacaacaagaaactaggagaatgggtaggcctttgtaaaattgacagagaggggaaaccccgtaaagtggttggttgcagttgtgtagtagttaaggactatggcaaggagtctcaggccaaggatgtcattgaagagtatttcaaatgcaagaaatgaagaaataaatctttggctcacaaaaaaaaaaaaaaaaaaaaaaaaaaagggcggccgctccctatagtgagtcgtattaagcttaattagctgagcttggactcctgttgatagatccagtaatgacctcagaactccatctggatttgttcagaacgctcggttgccgccgggcgttttttattggtgagaatccaagctagcttggcgagattttcaggagctaaggaagctaaaatggagaaaaaaatcactggatataccaccgttgatatatcccaatggcatcgtaaagaacattttgaggcatttcagtcagttgctcaatgtacctataaccagaccgttcagctggatattacggcctttttaaagaccgtaaagaaaaataagcacaagttttatccggcctttattcacattcttgcccgcctgatgaatgctcatccggaanttcgtatggcaatgaaagacggtgagctggtgatatgggatagtgttcncccttgttacnccgttttccatgancnaaactgaaacgttttcntcnctctggagtgaataccncgacgatttccggcagtttctacccatatattcccaaaangtggcgngttacggngaaaaccngggcctatttccntaaagggttnattganaaaatttttttcncnccnccccancccctgggggantttccccantttngatttaaacnnggcccaaatggganancttcttcccccccnnttttccccngggnaaaaattnancccnanggnnaaangggnctnanccccnggnaantcnggttcccnngccctttgggaaggcctccccttccccnaaagtnttagaaatnaccaaaaccgcnananggngggggggggngnattttttngggnntttnggnccntaacccngggggaaanncnnncttgggan

SEQ ID NO: 208 - DNA, 1428 bp, Homo Sapiens
  misc_feature (474)..(474): n is a, c, g, or t
  misc_feature (492)..(492): n is a, c, g, or t
  misc_feature (514)..(514): n is a, c, g, or t
  misc_feature (551)..(551): n is a, c, g, or t
  misc_feature (603)..(603): n is a, c, g, or t
  misc_feature (797)..(797): n is a, c, g, or t
  misc_feature (801)..(801): n is a, c, g, or t
  misc_feature (819)..(819): n is a, c, g, or t
  misc_feature (868)..(868): n is a, c, g, or t
  misc_feature (870)..(870): n is a, c, g, or t
  misc_feature (874)..(874): n is a, c, g, or t
  misc_feature (892)..(892): n is a, c, g, or t
  misc_feature (908)..(909): n is a, c, g, or t
  misc_feature (923)..(923): n is a, c, g, or t
  misc_feature (928)..(928): n is a, c, g, or t
  misc_feature (942)..(943): n is a, c, g, or t
  misc_feature (950)..(950): n is a, c, g, or t
  misc_feature (952)..(952): n is a, c, g, or t
  misc_feature (965)..(965): n is a, c, g, or t
  misc_feature (967)..(967): n is a, c, g, or t
  misc_feature (969)..(969): n is a, c, g, or t
  misc_feature (971)..(971): n is a, c, g, or t
  misc_feature (975)..(975): n is a, c, g, or t
  misc_feature (989)..(989): n is a, c, g, or t
  misc_feature (994)..(994): n is a, c, g, or t
  misc_feature (997)..(997): n is a, c, g, or t
  misc_feature (1010)..(1010): n is a, c, g, or t
  misc_feature (1041)..(1041): n is a, c, g, or t
  misc_feature (1043)..(1044): n is a, c, g, or t
  misc_feature (1050)..(1050): n is a, c, g, or t
  misc_feature (1052)..(1054): n is a, c, g, or t
  misc_feature (1074)..(1074): n is a, c, g, or t
  misc_feature (1085)..(1085): n is a, c, g, or t
  misc_feature (1090)..(1090): n is a, c, g, or t
  misc_feature (1093)..(1093): n is a, c, g, or t
  misc_feature (1095)..(1095): n is a, c, g, or t
  misc_feature (1112)..(1112): n is a, c, g, or t
  misc_feature (1120)..(1120): n is a, c, g, or t
  misc_feature (1124)..(1124): n is a, c, g, or t
  misc_feature (1130)..(1131): n is a, c, g, or t
  misc_feature (1139)..(1139): n is a, c, g, or t
  misc_feature (1141)..(1142): n is a, c, g, or t
  misc_feature (1150)..(1150): n is a, c, g, or t
  misc_feature (1152)..(1152): n is a, c, g, or t
  misc_feature (1154)..(1154): n is a, c, g, or t
  misc_feature (1160)..(1161): n is a, c, g, or t
  misc_feature (1167)..(1167): n is a, c, g, or t
  misc_feature (1178)..(1178): n is a, c, g, or t
  misc_feature (1180)..(1180): n is a, c, g, or t
  misc_feature (1197)..(1197): n is a, c, g, or t
  misc_feature (1201)..(1201): n is a, c, g, or t
  misc_feature (1212)..(1212): n is a, c, g, or t
  misc_feature (1215)..(1215): n is a, c, g, or t
  misc_feature (1219)..(1219): n is a, c, g, or t
  misc_feature (1221)..(1223): n is a, c, g, or t
  misc_feature (1228)..(1229): n is a, c, g, or t
  misc_feature (1231)..(1233): n is a, c, g, or t
  misc_feature (1239)..(1239): n is a, c, g, or t
  misc_feature (1242)..(1242): n is a, c, g, or t
  misc_feature (1244)..(1245): n is a, c, g, or t
  misc_feature (1249)..(1249): n is a, c, g, or t
  misc_feature (1253)..(1253): n is a, c, g, or t
  misc_feature (1255)..(1258): n is a, c, g, or t
  misc_feature (1260)..(1260): n is a, c, g, or t
  misc_feature (1264)..(1265): n is a, c, g, or t
  misc_feature (1274)..(1274): n is a, c, g, or t
  misc_feature (1281)..(1281): n is a, c, g, or t
  misc_feature (1284)..(1284): n is a, c, g, or t
  misc_feature (1287)..(1287): n is a, c, g, or t
  misc_feature (1290)..(1290): n is a, c, g, or t
  misc_feature (1292)..(1292): n is a, c, g, or t
  misc_feature (1298)..(1298): n is a, c, g, or t
  misc_feature (1301)..(1301): n is a, c, g, or t
  misc_feature (1310)..(1311): n is a, c, g, or t
  misc_feature (1322)..(1324): n is a, c, g, or t
  misc_feature (1326)..(1327): n is a, c, g, or t
  misc_feature (1332)..(1332): n is a, c, g, or t
  misc_feature (1334)..(1334): n is a, c, g, or t
  misc_feature (1342)..(1344): n is a, c, g, or t
  misc_feature (1352)..(1352): n is a, c, g, or t
  misc_feature (1358)..(1359): n is a, c, g, or t
  misc_feature (1372)..(1372): n is a, c, g, or t
  misc_feature (1377)..(1377): n is a, c, g, or t
  misc_feature (1380)..(1381): n is a, c, g, or t
  misc_feature (1384)..(1387): n is a, c, g, or t
  misc_feature (1390)..(1390): n is a, c, g, or t
  misc_feature (1394)..(1394): n is a, c, g, or t
  misc_feature (1397)..(1397): n is a, c, g, or t
  misc_feature (1402)..(1402): n is a, c, g, or t
  misc_feature (1410)..(1410): n is a, c, g, or t
  misc_feature (1413)..(1413): n is a, c, g, or t
  misc_feature (1418)..(1419): n is a, c, g, or t
  misc_feature (1422)..(1423): n is a, c, g, or t
atatagagaaattactatgagaggatcgcatcaccatcaccatcacggatcctatttaggtgacactatagaatcgtcgacccacgcgtccggccaaggcctgctgggcccccgcggacccaggtgctctgggtcacggtccctgtccccgcacccccgcttctgtctgccccattgtggctcctcaggctctctcccctgctctcccacctctacctccacccccaccggcctgacgctgtggccccgggacccagcagagctgggggagggatcagcccccaaagaaatgggggtgcatgctgggcctggccccctggcccacccccactttccagggcaaaaagggcccagggttataataagtaaataacttgtctgtaaaaaaaaaaaaaaaaaaaaaaaaaagggcggccgctccctatagtgagtcgtattaagcttaattagctgagcttggactcctgttgatanatccagtaatgacctcanaactccatctggatttgttcanaacgctcggttgccgccgggcgttttttattggtganaatccaagctagcttggcgagattttcaggagctaaggaagctaaaatgganaaaaaaatcactggatataccaccgttgatatatcccaatggcatcgtaaagaacattttgaggcatttcagtcagttgctcaatgtacctataaccagaccgttcagctggatattacggcctttttaaagaccgtaaagaaaaataagcacaagttttatccggcctttattcacattcttgcccgcctgangaangctcatccggaaatttcntatggcaatgaaaaaacggtgagctgggtgatatgggaaaagtgttcancnttgnttaaaccgttttttccangaaacaaactgaaaannttttctatcgcctntggantgaaaaaccacgannaattccngnaatttttttaaananananttcncaaaaagggggcgngttanggngaaaaaacttggncctattttcctaaaagggtttaattgaaaananntttttncnnncaaccaaatccccggggggnaatttcccaanttttnaantnaaagggggccaaaaagnaaaatttntttncccccnnttttcccnannggaaaaanananccaagnnaaaaanggtttaatccncngggaaataaaggttatnagcnctttggaaagnttncaancnnnaaaanntnnnaaatanaanannattnaaangnnnngngggnnattttttangaaattnggnctnaancnggaaanatnttcttaggnnaaaaaaaaaannntnnaaaangncttttttnnnttgtttgnaaactnnaaaaaaaaacctnaaatnctnnttnnnnaanaaantanatatntttaaaantanttatnnatnnaaaaa

SEQ ID NO: 209 - DNA, 1200 bp, Homo Sapiens
  misc_feature (833)..(833): n is a, c, g, or t
  misc_feature (907)..(907): n is a, c, g, or t
  misc_feature (934)..(934): n is a, c, g, or t
  misc_feature (968)..(968): n is a, c, g, or t
  misc_feature (977)..(977): n is a, c, g, or t
  misc_feature (1015)..(1015): n is a, c, g, or t
  misc_feature (1019)..(1019): n is a, c, g, or t
  misc_feature (1041)..(1041): n is a, c, g, or t
  misc_feature (1052)..(1052): n is a, c, g, or t
  misc_feature (1085)..(1085): n is a, c, g, or t
  misc_feature (1088)..(1088): n is a, c, g, or t
  misc_feature (1092)..(1092): n is a, c, g, or t
  misc_feature (1103)..(1103): n is a, c, g, or t
  misc_feature (1139)..(1139): n is a, c, g, or t
  misc_feature (1150)..(1150): n is a, c, g, or t
  misc_feature (1157)..(1157): n is a, c, g, or t
  misc_feature (1171)..(1171): n is a, c, g, or t
  misc_feature (1175)..(1175): n is a, c, g, or t
  misc_feature (1192)..(1192): n is a, c, g, or t
tagagagattactatgagaggatcgcatcaccatcaccatcacggatcctatttaggtgacactatagaatcgtcgacccacgcgtccggggaaatgctggcgcgcgcggcgcggggcactggggcccttttgctgaggggctctctactggcttctggccgcgctccgcgccgcgcctcctctggattgccccgaaacaccgtggtactgttcgtgccgcagcaggaggcctgggtggtggagcgaatgggccgattccaccggatcctggagcctggtttgaacatcctcatccctgtgttagaccggatccgatatgtgcagagtctcaaggaaattgtcatcaacgtgcctgagcagtcggctgtgactctcgacaatgtaactctgcaaatcgatggagtcctttacctgcgcatcatggacccttacaaggcaagctacggtgtggaggaccctgagtatgccgtcacccagctagctcaaacaaccatgagatcagagctcggcaaactctctctggacaaagtcttccgggaacgggagtccctgaatgccagcattgtggatgccatcaaccaagctgctgactgctggggtatccgctgcctccgttatgagatcaaggatatccatgtgccaccccgggtgaaagagtctatgcagatgcaggtggaggcagagcggcggaaacgggccacagttctagagtctgaggggacccgagagtcggccatcaatgtggcagaagggaagaaacaggcccagatcctggcctccgaagcagaaaaggctgaacagataaatcaggcagcaggagaggccagtgcanttctggcgaaggccaaggctaaagctgaaacctattcgaatcctggctgcagctctgacacaacataaatgganatgcagcagcttccctgactgtggccnaacatatgtcaccgcgttctccaaactggccaangactccaanactatcctactgccctccaaccctggggatgtcaccancaanggggctcaggccatgggtgtantggaaccctcncaaaaaccccaatgccaaggaatcccaaattcnctntccnaggggaacaanaaaaattccaggtaaaaatgcaattcttgaaaaaanttttttcaatnaaaaaanttaatggacttggnttgnccaggaatttggaaaanaaaaaaat

SEQ ID NO: 210 - DNA, 1356 bp, Homo Sapiens
  misc_feature (1)..(2): n is a, c, g, or t
  misc_feature (4)..(4): n is a, c, g, or t
  misc_feature (835)..(835): n is a, c, g, or t
  misc_feature (883)..(883): n is a, c, g, or t
  misc_feature (962)..(962): n is a, c, g, or t
  misc_feature (968)..(968): n is a, c, g, or t
  misc_feature (973)..(973): n is a, c, g, or t
  misc_feature (993)..(994): n is a, c, g, or t
  misc_feature (1002)..(1002): n is a, c, g, or t
  misc_feature (1012)..(1012): n is a, c, g, or t
  misc_feature (1014)..(1014): n is a, c, g, or t
  misc_feature (1026)..(1026): n is a, c, g, or t
  misc_feature (1034)..(1035): n is a, c, g, or t
  misc_feature (1039)..(1039): n is a, c, g, or t
  misc_feature (1049)..(1049): n is a, c, g, or t
  misc_feature (1055)..(1055): n is a, c, g, or t
  misc_feature (1070)..(1070): n is a, c, g, or t
  misc_feature (1072)..(1072): n is a, c, g, or t
  misc_feature (1074)..(1075): n is a, c, g, or t
  misc_feature (1082)..(1082): n is a, c, g, or t
  misc_feature (1095)..(1097): n is a, c, g, or t
  misc_feature (1108)..(1108): n is a, c, g, or t
  misc_feature (1121)..(1121): n is a, c, g, or t
  misc_feature (1125)..(1125): n is a, c, g, or t
  misc_feature (1134)..(1134): n is a, c, g, or t
  misc_feature (1139)..(1139): n is a, c, g, or t
  misc_feature (1141)..(1141): n is a, c, g, or t
  misc_feature (1143)..(1143): n is a, c, g, or t
  misc_feature (1149)..(1156): n is a, c, g, or t
  misc_feature (1159)..(1159): n is a, c, g, or t
  misc_feature (1161)..(1161): n is a, c, g, or t
  misc_feature (1163)..(1163): n is a, c, g, or t
  misc_feature (1165)..(1166): n is a, c, g, or t
  misc_feature (1169)..(1169): n is a, c, g, or t
  misc_feature (1171)..(1171): n is a, c, g, or t
  misc_feature (1174)..(1175): n is a, c, g, or t
  misc_feature (1182)..(1184): n is a, c, g, or t
  misc_feature (1188)..(1191): n is a, c, g, or t
  misc_feature (1193)..(1193): n is a, c, g, or t
  misc_feature (1195)..(1196): n is a, c, g, or t
  misc_feature (1200)..(1200): n is a, c, g, or t
  misc_feature (1202)..(1203): n is a, c, g, or t
  misc_feature (1206)..(1207): n is a, c, g, or t
  misc_feature (1209)..(1210): n is a, c, g, or t
  misc_feature (1212)..(1213): n is a, c, g, or t
  misc_feature (1220)..(1220): n is a, c, g, or t
  misc_feature (1222)..(1225): n is a, c, g, or t
  misc_feature (1227)..(1228): n is a, c, g, or t
  misc_feature (1231)..(1231): n is a, c, g, or t
  misc_feature (1236)..(1239): n is a, c, g, or t
  misc_feature (1241)..(1242): n is a, c, g, or t
  misc_feature (1246)..(1246): n is a, c, g, or t
  misc_feature (1249)..(1249): n is a, c, g, or t
  misc_feature (1251)..(1254): n is a, c, g, or t
  misc_feature (1257)..(1259): n is a, c, g, or t
  misc_feature (1261)..(1263): n is a, c, g, or t
  misc_feature (1267)..(1269): n is a, c, g, or t
  misc_feature (1274)..(1275): n is a, c, g, or t
  misc_feature (1279)..(1285): n is a, c, g, or t
  misc_feature (1289)..(1289): n is a, c, g, or t
  misc_feature (1292)..(1294): n is a, c, g, or t
  misc_feature (1296)..(1300): n is a, c, g, or t
  misc_feature (1302)..(1303): n is a, c, g, or t
  misc_feature (1306)..(1309): n is a, c, g, or t
  misc_feature (1312)..(1313): n is a, c, g, or t
  misc_feature (1315)..(1315): n is a, c, g, or t
  misc_feature (1318)..(1319): n is a, c, g, or t
  misc_feature (1321)..(1321): n is a, c, g, or t
  misc_feature (1324)..(1325): n is a, c, g, or t
  misc_feature (1328)..(1331): n is a, c, g, or t
  misc_feature (1336)..(1336): n is a, c, g, or t
  misc_feature (1340)..(1344): n is a, c, g, or t
  misc_feature (1346)..(1350): n is a, c, g, or t
  misc_feature (1352)..(1353): n is a, c, g, or t
nnantagagaaattactatgagaggatcgcatcaccatcaccatcacggatcctatttaggtgacactatagaatcgtcgacccacgcgtccgcccacgcgtccgggagtcttccaggcctgagctacaatgtttcagtaggatttgggaggggcaaggacaccatactgttcagcgaccccactcttcctagtggacagaggtcgagatccccactgctgaagtttgtcgagcagcccactgagaacaaagcagatcccaaggatggggaggctcagaagcaagaagaagatgaaagttgtgccgctgctgaggcgttgacagcgcctgaggatgctgggaggcccgctgtcaactccccagcaaatcagagccgcgggaaccaatgcaagctctttcatccttcattaccccagttaccttctgaggaagaagtaaacagccttgggagggaaataattaaactgacaaaggaacaggcagctgcagaactggaagaggtcagaagagagagtcccatagaaggtcagaggagtgagacggggccagccccgccaggcctggccatccagggggagctccctaaatctcacctggactccttcgaggccagccggccagcagccaaagcttccacaccggaagacggcaaagggatcccagagggcggaggcatgaggagcaccgtgaaaacctgaaggggagagggatctgacacaatgacacattgaaagccccagagagggtcaagaatgaagcatcggaatggtgcgctcacgtcgccttctcctgaaatacctccgagtctgcaagtgagaaaacgcgctgatcctgnttgcaaactgtgaatattctgatgatgccagtacagttttgatttatnaaatgtaggtcctcaagcttctcagtgtcatctcttttctgccaaaaagtgctactgtgaacagggcccaggccccagnaatcgngtccnccatatgggctggtttttcnncatccgtnttttctggcnancttttgtttttntcaaaaannaaanttttttttgnattaancattttaatggttgncnannccaaaanttttggggaaaannntaaaacttganggggttttttaantccnggtcccccntcttngncnaggttnnnnnnnnttngnanannaangnttnntttttannnaaannnntncnnaagnannccnngnntnnccccccntnnnntnnggnccccnnnnannattnccngnnnnggnnngnnnttgnnnttttnncccnnnnnnntttnttnnngnnnnnanntgnnnnttnnanggnncnttnnccnnnnaaaantttnnnnntnnnnntnnaaa

SEQ ID NO: 211 - DNA, 1382 bp, Homo Sapiens
  misc_feature (14)..(14): n is a, c, g, or t
  misc_feature (697)..(697): n is a, c, g, or t
  misc_feature (707)..(709): n is a, c, g, or t
  misc_feature (711)..(742): n is a, c, g, or t
  misc_feature (787)..(787): n is a, c, g, or t
  misc_feature (792)..(792): n is a, c, g, or t
  misc_feature (811)..(811): n is a, c, g, or t
  misc_feature (897)..(897): n is a, c, g, or t
  misc_feature (921)..(921): n is a, c, g, or t
  misc_feature (930)..(930): n is a, c, g, or t
  misc_feature (959)..(959): n is a, c, g, or t
  misc_feature (963)..(963): n is a, c, g, or t
  misc_feature (966)..(966): n is a, c, g, or t
  misc_feature (973)..(974): n is a, c, g, or t
  misc_feature (981)..(981): n is a, c, g, or t
  misc_feature (988)..(988): n is a, c, g, or t
  misc_feature (997)..(997): n is a, c, g, or t
  misc_feature (1009)..(1009): n is a, c, g, or t
  misc_feature (1012)..(1013): n is a, c, g, or t
  misc_feature (1015)..(1015): n is a, c, g, or t
  misc_feature (1018)..(1018): n is a, c, g, or t
  misc_feature (1021)..(1021): n is a, c, g, or t
  misc_feature (1025)..(1025): n is a, c, g, or t
  misc_feature (1038)..(1038): n is a, c, g, or t
  misc_feature (1041)..(1041): n is a, c, g, or t
  misc_feature (1043)..(1044): n is a, c, g, or t
  misc_feature (1048)..(1048): n is a, c, g, or t
  misc_feature (1062)..(1062): n is a, c, g, or t
  misc_feature (1078)..(1079): n is a, c, g, or t
  misc_feature (1090)..(1090): n is a, c, g, or t
  misc_feature (1097)..(1097): n is a, c, g, or t
  misc_feature (1102)..(1102): n is a, c, g, or t
  misc_feature (1105)..(1105): n is a, c, g, or t
  misc_feature (1113)..(1113): n is a, c, g, or t
  misc_feature (1118)..(1118): n is a, c, g, or t
  misc_feature (1132)..(1132): n is a, c, g, or t
  misc_feature (1136)..(1136): n is a, c, g, or t
  misc_feature (1139)..(1139): n is a, c, g, or t
  misc_feature (1143)..(1143): n is a, c, g, or t
  misc_feature (1148)..(1149): n is a, c, g, or t
  misc_feature (1163)..(1163): n is a, c, g, or t
  misc_feature (1166)..(1167): n is a, c, g, or t
  misc_feature (1173)..(1174): n is a, c, g, or t
  misc_feature (1177)..(1177): n is a, c, g, or t
  misc_feature (1181)..(1181): n is a, c, g, or t
  misc_feature (1185)..(1185): n is a, c, g, or t
  misc_feature (1188)..(1189): n is a, c, g, or t
  misc_feature (1191)..(1191): n is a, c, g, or t
  misc_feature (1196)..(1196): n is a, c, g, or t
  misc_feature (1220)..(1221): n is a, c, g, or t
  misc_feature (1224)..(1224): n is a, c, g, or t
  misc_feature (1226)..(1227): n is a, c, g, or t
  misc_feature (1233)..(1233): n is a, c, g, or t
  misc_feature (1237)..(1237): n is a, c, g, or t
  misc_feature (1255)..(1256): n is a, c, g, or t
  misc_feature (1258)..(1258): n is a, c, g, or t
  misc_feature (1265)..(1268): n is a, c, g, or t
  misc_feature (1272)..(1272): n is a, c, g, or t
  misc_feature (1275)..(1276): n is a, c, g, or t
  misc_feature (1278)..(1278): n is a, c, g, or t
  misc_feature (1283)..(1283): n is a, c, g, or t
  misc_feature (1285)..(1285): n is a, c, g, or t
  misc_feature (1289)..(1289): n is a, c, g, or t
  misc_feature (1295)..(1295): n is a, c, g, or t
  misc_feature (1298)..(1299): n is a, c, g, or t
  misc_feature (1301)..(1301): n is a, c, g, or t
  misc_feature (1308)..(1308): n is a, c, g, or t
  misc_feature (1311)..(1311): n is a, c, g, or t
  misc_feature (1314)..(1314): n is a, c, g, or t
  misc_feature (1317)..(1317): n is a, c, g, or t
  misc_feature (1320)..(1320): n is a, c, g, or t
  misc_feature (1326)..(1328): n is a, c, g, or t
  misc_feature (1332)..(1332): n is a, c, g, or t
  misc_feature (1338)..(1338): n is a, c, g, or t
  misc_feature (1345)..(1345): n is a, c, g, or t
  misc_feature (1353)..(1353): n is a, c, g, or t
  misc_feature (1355)..(1357): n is a, c, g, or t
  misc_feature (1361)..(1361): n is a, c, g, or t
  misc_feature (1367)..(1367): n is a, c, g, or t
  misc_feature (1369)..(1369): n is a, c, g, or t
  misc_feature (1373)..(1373): n is a, c, g, or t
  misc_feature (1379)..(1379): n is a, c, g, or t
  misc_feature (1382)..(1382): n is a, c, g, or t
aatagagagattanctatgagaggatcgcatcaccatcaccatcacggatcctatttaggtgacactatagaatcgtcgacccacgcgtccggtggttcccaaagatgtcaatgctgccattgccaccatcaagaccaagcgtaccatccagtttgtggattggtgccccactggcttcaaggttggcatcaactaccagcctcccactgtggtgcctggtggagacctggccaaggtacagagagctgtgtgcatgctgagcaacaccacagccattgctgaggcctgggctcgcctggaccacaagtttgacctgatgtatgccaaacgtgcctttgttcactggtacgttggggaggggatggaggaaggtgagttttcagaggcccgtgaggacatggctgcccttgagaaggattatgaggaggttggtgtggattctgttgaaggagagggtgaggaagaaggagaggaatactaaagttaaaacgtcacaaaggtgctgcttttacagggaagcttattctgttttaaacattgaaaagttgtggtctgatcagttaatttgtatgtagcagtgtatgctctcatatacaattactgacctatgctctaaaacatgaatgctttgttacagacccaagctgtccatttctgtgatgggttttgaataaagtattccctgtcttaaatganaaaaaaaaannnannnnnnnnnnnnnnnnnnnnnnnnnnnnnnnnaaagggcggccgctccctatagtgagtcgtattaagcttaattanctgancttggactcctgttgatanatccagtaatgacctcaaaactccatctggatttgttcaaaacgctcggttgcccccgggcgtttttttattggtgaaaatccaanctagcttggcgaaattttccgganctaaggaanctaaaatggaaaaaaaaatccctggatanaccnccnttgaaanntcccaanggcaccnaaaaaaaantttgaggcattncanncnttnccncaangaacctaaaaccnaancnnttcncctggaattaacgncctttttaaaaaccgnnaaaaaaaaaancccaaanttttnccnggcctttnttccnatttttgccccccngaanaangccnccccnnaatttcctaatggnaannaaaaannggnaacngggnaanngnaaaangttccccttttaacccttttcccnnaananngaaaantttnccccccggaagaaaaacnnanaatttcnnnntttncannanatttncnaaangggggnttnngnaaacccnccnttnccnaanggtttnnnaaantttttnccccccnccccgggnannncccnttttanancccnaaaaanctn

SEQ ID NO: 212 - DNA, 1407 bp, Homo Sapiens
  misc_feature (4)..(4): n is a, c, g, or t
  misc_feature (754)..(754): n is a, c, g, or t
  misc_feature (757)..(757): n is a, c, g, or t
  misc_feature (829)..(829): n is a, c, g, or t
  misc_feature (844)..(844): n is a, c, g, or t
  misc_feature (876)..(876): n is a, c, g, or t
  misc_feature (882)..(882): n is a, c, g, or t
  misc_feature (899)..(899): n is a, c, g, or t
  misc_feature (917)..(917): n is a, c, g, or t
  misc_feature (943)..(943): n is a, c, g, or t
  misc_feature (959)..(959): n is a, c, g, or t
  misc_feature (975)..(976): n is a, c, g, or t
  misc_feature (978)..(978): n is a, c, g, or t
  misc_feature (989)..(989): n is a, c, g, or t
  misc_feature (991)..(991): n is a, c, g, or t
  misc_feature (997)..(997): n is a, c, g, or t
  misc_feature (1007)..(1008): n is a, c, g, or t
  misc_feature (1021)..(1021): n is a, c, g, or t
  misc_feature (1029)..(1029): n is a, c, g, or t
  misc_feature (1031)..(1031): n is a, c, g, or t
  misc_feature (1035)..(1037): n is a, c, g, or t
  misc_feature (1040)..(1040): n is a, c, g, or t
  misc_feature (1053)..(1053): n is a, c, g, or t
  misc_feature (1062)..(1062): n is a, c, g, or t
  misc_feature (1072)..(1073): n is a, c, g, or t
  misc_feature (1084)..(1084): n is a, c, g, or t
  misc_feature (1089)..(1090): n is a, c, g, or t
  misc_feature (1097)..(1097): n is a, c, g, or t
  misc_feature (1104)..(1104): n is a, c, g, or t
  misc_feature (1113)..(1113): n is a, c, g, or t
  misc_feature (1115)..(1115): n is a, c, g, or t
  misc_feature (1126)..(1126): n is a, c, g, or t
  misc_feature (1131)..(1131): n is a, c, g, or t
  misc_feature (1135)..(1135): n is a, c, g, or t
  misc_feature (1139)..(1139): n is a, c, g, or t
  misc_feature (1143)..(1144): n is a, c, g, or t
  misc_feature (1153)..(1154): n is a, c, g, or t
  misc_feature (1156)..(1156): n is a, c, g, or t
  misc_feature (1169)..(1169): n is a, c, g, or t
  misc_feature (1184)..(1184): n is a, c, g, or t
  misc_feature (1187)..(1188): n is a, c, g, or t
  misc_feature (1191)..(1191): n is a, c, g, or t
  misc_feature (1195)..(1196): n is a, c, g, or t
  misc_feature (1201)..(1201): n is a, c, g, or t
  misc_feature (1203)..(1204): n is a, c, g, or t
  misc_feature (1207)..(1207): n is a, c, g, or t
  misc_feature (1220)..(1221): n is a, c, g, or t
  misc_feature (1228)..(1230): n is a, c, g, or t
  misc_feature (1235)..(1235): n is a, c, g, or t
  misc_feature (1248)..(1248): n is a, c, g, or t
  misc_feature (1256)..(1256): n is a, c, g, or t
  misc_feature (1263)..(1265): n is a, c, g, or t
  misc_feature (1268)..(1268): n is a, c, g, or t
  misc_feature (1274)..(1276): n is a, c, g, or t
  misc_feature (1279)..(1279): n is a, c, g, or t
  misc_feature (1281)..(1281): n is a, c, g, or t
  misc_feature (1286)..(1287): n is a, c, g, or t
  misc_feature (1294)..(1297): n is a, c, g, or t
  misc_feature (1303)..(1303): n is a, c, g, or t
  misc_feature (1305)..(1307): n is a, c, g, or t
  misc_feature (1310)..(1310): n is a, c, g, or t
  misc_feature (1315)..(1315): n is a, c, g, or t
  misc_feature (1319)..(1319): n is a, c, g, or t
  misc_feature (1324)..(1325): n is a, c, g, or t
  misc_feature (1329)..(1329): n is a, c, g, or t
  misc_feature (1331)..(1332): n is a, c, g, or t
  misc_feature (1334)..(1335): n is a, c, g, or t
  misc_feature (1337)..(1338): n is a, c, g, or t
  misc_feature (1344)..(1344): n is a, c, g, or t
  misc_feature (1348)..(1348): n is a, c, g, or t
  misc_feature (1357)..(1358): n is a, c, g, or t
  misc_feature (1360)..(1360): n is a, c, g, or t
  misc_feature (1367)..(1367): n is a, c, g, or t
  misc_feature (1369)..(1370): n is a, c, g, or t
  misc_feature (1378)..(1378): n is a, c, g, or t
  misc_feature (1380)..(1380): n is a, c, g, or t
  misc_feature (1386)..(1386): n is a, c, g, or t
  misc_feature (1390)..(1390): n is a, c, g, or t
  misc_feature (1393)..(1393): n is a, c, g, or t
  misc_feature (1400)..(1400): n is a, c, g, or t
  misc_feature (1402)..(1403): n is a, c, g, or t
  misc_feature (1405)..(1405): n is a, c, g, or t
  misc_feature (1407)..(1407): n is a, c, g, or t
aganaattactatgagaggatcgcatcaccatcaccatcacggatcctatttaggtgacactatagaatcgtcgacccacgcgtccggcgggcagggtgctgacggctgggccacacgctgtctcattgtctctgcagtccgctgcccggcccggaagcggaggaactcacgggatggggacccgctgccctccagcctcagctgcaaggtgcacgtggcatcggtgaacaacttccccacggctgcgggcctggcctcctcagcggcgggctatgcctgcctaggtaccttttgttgcccttgtcgcaggccgcaacctctgcaggccgtgaacagagagtgtccgagagtggaactagcggaggtgggggacagacggctgggccggtgaatgctggcctcaaaggctgatggcccagaagccctgtcatctggaaatccccatttgccgtggggtgtgggacgttcctggggcggtgagctgtcagggagcacagcgcaggcagctctgaggaccctccctgaatccgcatgcctgcagcctacaccctggcccgtgtctacggcgtggagagtgacctctcagaagtggctcgccggggctcaggcagcgcctgccggagcctgtatgggggctttgtggagtggcagatgggagagcaggccgacgggaaggacagcatcgctcggcaagtggcccccgagtcacactggcctgaactccgcgtgctcatccttgtggtgagcgctganaanaagctgacaggcagtaccgtgggcatgcgggccagtgtggagaccagccccctgcttcggttccgggccgantccgtggtgcccgcncgcatggcggaaaatggccccctgcatccggnaacganacttcccccaactttcncccagcttgaccatgaangaacagcaaccagtttccacgccacntgccctcgaaaccttncccgcccatctcttanntnaatgccaattntnctgggngcatcatccnncttggtgcaaccnctttcaancncccnnncanggggaaaaccaanggggcgtanaccttttaanncgggcccccanggccnnaattttncccctgnaaaaaactntngctaaattttngctcnttgntggnaagnnttttccccnngntcaaaggaaaaanttttttaaggcctcnatnnaancccnnccctntnnaantaaatttaagttnncttggcnnngaacnaaaccccgggggnccaaaaanttatttnnncangggggnnnggncnaaatnnaaaaacnnnncccccntnnnttntaaanttgnaaaannattntnntnntnnaaaaancttncctttaaanngngcccccnannaaaaaaanangggggncacntcnaaatagngnntntn

SEQ ID NO: 213 - DNA, 314 bp, Homo Sapiens
  misc_feature (1)..(5): n is a, c, g, or t
  misc_feature (8)..(8): n is a, c, g, or t
  misc_feature (10)..(10): n is a, c, g, or t
  misc_feature (213)..(213): n is a, c, g, or t
  misc_feature (230)..(230): n is a, c, g, or t
  misc_feature (235)..(235): n is a, c, g, or t
  misc_feature (253)..(255): n is a, c, g, or t
  misc_feature (257)..(260): n is a, c, g, or t
  misc_feature (262)..(262): n is a, c, g, or t
  misc_feature (265)..(265): n is a, c, g, or t
  misc_feature (267)..(268): n is a, c, g, or t
  misc_feature (270)..(271): n is a, c, g, or t
  misc_feature (274)..(276): n is a, c, g, or t
  misc_feature (278)..(294): n is a, c, g, or t
  misc_feature (296)..(296): n is a, c, g, or t
  misc_feature (298)..(299): n is a, c, g, or t
  misc_feature (301)..(307): n is a, c, g, or t
  misc_feature (309)..(314): n is a, c, g, or t
nnnnnaantnggagaaaaattaactatgaagaggatcgcatcaccatcaccaatcacggatcctatttaggtgacactatagaatcgtcgacccacgcgtccggtccctgtgaccggcttggcggttggagcggctgtcgccatgttgtcggtagcagcccgctcgggcccgttcgcgcccgtcctgtcggccacgtcccgcggggtggcggncgcgctgcggcccttgntgcangccacggtgcccgcaacnnngnnnnangtngnngnnagnnngnnnnnnnnnnnnnnnnngngnnannnnnnnannnnnn

SEQ ID NO: 214 - DNA, 1200 bp, Homo Sapiens
  misc_feature (785)..(785): n is a, c, g, or t
  misc_feature (850)..(850): n is a, c, g, or t
  misc_feature (888)..(888): n is a, c, g, or t
  misc_feature (937)..(937): n is a, c, g, or t
  misc_feature (942)..(942): n is a, c, g, or t
  misc_feature (972)..(972): n is a, c, g, or t
  misc_feature (975)..(975): n is a, c, g, or t
  misc_feature (982)..(982): n is a, c, g, or t
  misc_feature (986)..(986): n is a, c, g, or t
  misc_feature (993)..(993): n is a, c, g, or t
  misc_feature (997)..(997): n is a, c, g, or t
  misc_feature (1001)..(1001): n is a, c, g, or t
  misc_feature (1003)..(1003): n is a, c, g, or t
  misc_feature (1036)..(1036): n is a, c, g, or t
  misc_feature (1039)..(1039): n is a, c, g, or t
  misc_feature (1042)..(1042): n is a, c, g, or t
  misc_feature (1044)..(1044): n is a, c, g, or t
  misc_feature (1047)..(1047): n is a, c, g, or t
  misc_feature (1066)..(1066): n is a, c, g, or t
  misc_feature (1074)..(1075): n is a, c, g, or t
  misc_feature (1077)..(1077): n is a, c, g, or t
  misc_feature (1079)..(1080): n is a, c, g, or t
  misc_feature (1085)..(1085): n is a, c, g, or t
  misc_feature (1095)..(1096): n is a, c, g, or t
  misc_feature (1099)..(1099): n is a, c, g, or t
  misc_feature (1104)..(1104): n is a, c, g, or t
  misc_feature (1110)..(1110): n is a, c, g, or t
  misc_feature (1114)..(1116): n is a, c, g, or t
  misc_feature (1118)..(1120): n is a, c, g, or t
  misc_feature (1127)..(1127): n is a, c, g, or t
  misc_feature (1133)..(1136): n is a, c, g, or t
  misc_feature (1138)..(1139): n is a, c, g, or t
  misc_feature (1145)..(1145): n is a, c, g, or t
  misc_feature (1147)..(1148): n is a, c, g, or t
  misc_feature (1150)..(1150): n is a, c, g, or t
  misc_feature (1158)..(1158): n is a, c, g, or t
  misc_feature (1162)..(1163): n is a, c, g, or t
  misc_feature (1165)..(1165): n is a, c, g, or t
  misc_feature (1167)..(1167): n is a, c, g, or t
  misc_feature (1171)..(1171): n is a, c, g, or t
  misc_feature (1186)..(1186): n is a, c, g, or t
  misc_feature (1190)..(1190): n is a, c, g, or t
tagagagattactatgagaggatcgcatcaccatcaccatcacggatcctatttaggtgacactatagaatcgtcgacccacgcgtccggcaacacggtggtggaggccaaggggcagcgggtccggggccgactgtacccctgggggatcgtggaggtggagaaccaggcgcattgcgacttcgtgaagctgcgcaacatgctcatccgcacgcatatgcacgacctcaaggacgtgacgtgcgacgtgcactacgagaactaccgcgcgcactgcatccagcagatgaccagcaaactgacccaggacagccgcatggagagccccatcccgatcctgccgctgcccaccccggacgccgagactgagaagcttatcaggatgaaggatgaggaactgaggcgcatgcaggagatgctgcagaggatgaagcagcagatgcaggaccagtgacgctcgccgcggacacaccgtccgtctccgggacgccctcgcacccctggacaccagaccggactgttcccgacccggagacgcggggccacagcccccagctgaccctaatttattctcagcaccaccccctcccaggtcattgtgtctgtttccgaggggcctggaccgtagcccccgcccagctggccctctctgaccttgggggatcaggagcgaagttgggcgggacttcagagatccgcctcccttgcccttcccccgcccccggacggtcacagcacccaaaccgcaggccctgctctggcaggcaggcaaagctaggcagaanaggattcccaggatcctgggtctgttccctgccccagtgctgcaaaacggacttgggagccctcntttgcctgctcccgcggggtcacccagcgagtgctganacccatttttctgtcgaggcggggccgagtcttcctttatccccaaacncctancgggcagggttgggctgaatcaaatggganccntccaaantaangaggccnaaangctncnaggaacggggtctgaccgtttaaccccttttcnaanccngnccnactggaaggccccggggcnttgggggnnancnncttcntggaaatttnnggngccgnccctgncctnnntnnngcttttntcccannnncnnttttgntnncnggattttnaacnnancntccnattttccccccccanaatncttcccccaa

SEQ ID NO: 215 - DNA, 1329 bp, Homo Sapiens
  misc_feature (1)..(1): n is a, c, g, or t
  misc_feature (813)..(813): n is a, c, g, or t
  misc_feature (881)..(881): n is a, c, g, or t
  misc_feature (897)..(897): n is a, c, g, or t
  misc_feature (937)..(937): n is a, c, g, or t
  misc_feature (945)..(945): n is a, c, g, or t
  misc_feature (965)..(965): n is a, c, g, or t
  misc_feature (1016)..(1016): n is a, c, g, or t
  misc_feature (1030)..(1030): n is a, c, g, or t
  misc_feature (1032)..(1033): n is a, c, g, or t
  misc_feature (1050)..(1050): n is a, c, g, or t
  misc_feature (1055)..(1055): n is a, c, g, or t
  misc_feature (1066)..(1066): n is a, c, g, or t
  misc_feature (1072)..(1072): n is a, c, g, or t
  misc_feature (1074)..(1074): n is a, c, g, or t
  misc_feature (1076)..(1076): n is a, c, g, or t
  misc_feature (1080)..(1080): n is a, c, g, or t
  misc_feature (1085)..(1086): n is a, c, g, or t
  misc_feature (1088)..(1088): n is a, c, g, or t
  misc_feature (1090)..(1090): n is a, c, g, or t
  misc_feature (1093)..(1093): n is a, c, g, or t
  misc_feature (1098)..(1098): n is a, c, g, or t
  misc_feature (1101)..(1101): n is a, c, g, or t
  misc_feature (1108)..(1108): n is a, c, g, or t
  misc_feature (1115)..(1115): n is a, c, g, or t
  misc_feature (1119)..(1119): n is a, c, g, or t
  misc_feature (1124)..(1124): n is a, c, g, or t
  misc_feature (1127)..(1127): n is a, c, g, or t
  misc_feature (1129)..(1129): n is a, c, g, or t
  misc_feature (1138)..(1138): n is a, c, g, or t
  misc_feature (1142)..(1143): n is a, c, g, or t
  misc_feature (1157)..(1157): n is a, c, g, or t
  misc_feature (1167)..(1167): n is a, c, g, or t
  misc_feature (1171)..(1171): n is a, c, g, or t
  misc_feature (1175)..(1175): n is a, c, g, or t
  misc_feature (1177)..(1177): n is a, c, g, or t
  misc_feature (1182)..(1182): n is a, c, g, or t
  misc_feature (1192)..(1192): n is a, c, g, or t
  misc_feature (1200)..(1201): n is a, c, g, or t
  misc_feature (1207)..(1207): n is a, c, g, or t
  misc_feature (1211)..(1212): n is a, c, g, or t
  misc_feature (1215)..(1215): n is a, c, g, or t
  misc_feature (1218)..(1219): n is a, c, g, or t
  misc_feature (1222)..(1222): n is a, c, g, or t
  misc_feature (1227)..(1227): n is a, c, g, or t
  misc_feature (1229)..(1229): n is a, c, g, or t
  misc_feature (1233)..(1235): n is a, c, g, or t
  misc_feature (1238)..(1239): n is a, c, g, or t
  misc_feature (1241)..(1241): n is a, c, g, or t
  misc_feature (1243)..(1245): n is a, c, g, or t
  misc_feature (1255)..(1256): n is a, c, g, or t
  misc_feature (1260)..(1261): n is a, c, g, or t
  misc_feature (1265)..(1265): n is a, c, g, or t
  misc_feature (1269)..(1269): n is a, c, g, or t
  misc_feature (1274)..(1274): n is a, c, g, or t
  misc_feature (1278)..(1278): n is a, c, g, or t
  misc_feature (1281)..(1281): n is a, c, g, or t
  misc_feature (1284)..(1287): n is a, c, g, or t
  misc_feature (1290)..(1290): n is a, c, g, or t
  misc_feature (1292)..(1292): n is a, c, g, or t
  misc_feature (1302)..(1302): n is a, c, g, or t
  misc_feature (1304)..(1304): n is a, c, g, or t
  misc_feature (1306)..(1306): n is a, c, g, or t
  misc_feature (1308)..(1309): n is a, c, g, or t
  misc_feature (1315)..(1315): n is a, c, g, or t
  misc_feature (1319)..(1322): n is a, c, g, or t
naatagagaaattactatgagaggatcgcatcaccatcaccatcacggatcctatttaggtgacactatagaatcgtcgacccacgcgtccgcaagtacgtgcctcgagccattctggtggacctggaacccggaaccatggacagtgtccgctcaggggcctttggacatctcttcaggcctgacaatttcatctttggtcagagtggggccggcaacaactgggccaagggtcactacacggagggggcggagctggtggattcggtcctggatgtggtgcggaaggagtgtgaaaactgcgactgcctgcagggcttccagctgacccactcgctggggggcggcacgggctccggcatgggcacgttgctcatcagcaaggtgcgtgaggagtatcccgaccgcatcatgaacaccttcagcgtcgtgccctcacccaaggtgtcagacacggtggtggagccctacaacgccacgctgtccatccaccagctggtggagaacacggatgagacctactgcatcgacaacgaggcgctctacgacatctgcttccgcaccctcaagctggccacgcccacctacggggacctcaaccacctggtatcggccaccatgagcggagtcaccacctccttgcgcttcccgggccagctcaacgctgacctgcgcaagctggccgtcaacatggtgcccttcccgcgcctgcacttcttcatgcccggcttcgcccccctcacagcccggggcagccagcagtaccgggccctgaccgtgcccgagctcacccagcagatgttcgatgccaanaacatgatggccgcctgcgacccgcgccacggccgctacctgacggtggccaccgtgttccggggccncatgtccatgaaggangtggacgaacaaatgctggccatccaaaacaaaacagcanctacttcntggaatggatcccaacaacntgaaggtggccgtgtgtgaatcccccccgcggcctcaaaatgtcctccacnttcatcgggaaaancnnggccatccagaactgtnaagcncatctccaaanattcangncntttncggcnnangnctnctgcntgnaaacggncaaggcntganaaaangantncccaagccnaaannaaatgaaaaactgnttccaaaacnacanacananccccnccaaaaaaangcaaattnnaaaaanaaannatngannccngcccnanaaannnccnncngnnnaaaaaggggnngggnnaaanaaanttaanccgnaanttnnnnaancntttcccccangncntnncccccnaaannnnccccccc

SEQ ID NO: 216 - DNA, 1393 bp, Homo Sapiens
  misc_feature (826)..(826): n is a, c, g, or t
  misc_feature (903)..(903): n is a, c, g, or t
  misc_feature (908)..(908): n is a, c, g, or t
  misc_feature (919)..(919): n is a, c, g, or t
  misc_feature (928)..(928): n is a, c, g, or t
  misc_feature (946)..(946): n is a, c, g, or t
  misc_feature (989)..(989): n is a, c, g, or t
  misc_feature (1031)..(1031): n is a, c, g, or t
  misc_feature (1040)..(1040): n is a, c, g, or t
  misc_feature (1063)..(1063): n is a, c, g, or t
  misc_feature (1066)..(1066): n is a, c, g, or t
  misc_feature (1075)..(1075): n is a, c, g, or t
  misc_feature (1078)..(1078): n is a, c, g, or t
  misc_feature (1081)..(1081): n is a, c, g, or t
  misc_feature (1086)..(1086): n is a, c, g, or t
  misc_feature (1102)..(1103): n is a, c, g, or t
  misc_feature (1122)..(1122): n is a, c, g, or t
  misc_feature (1124)..(1124): n is a, c, g, or t
  misc_feature (1127)..(1128): n is a, c, g, or t
  misc_feature (1140)..(1140): n is a, c, g, or t
  misc_feature (1147)..(1147): n is a, c, g, or t
  misc_feature (1150)..(1150): n is a, c, g, or t
  misc_feature (1156)..(1156): n is a, c, g, or t
  misc_feature (1158)..(1158): n is a, c, g, or t
  misc_feature (1165)..(1165): n is a, c, g, or t
  misc_feature (1179)..(1179): n is a, c, g, or t
  misc_feature (1182)..(1182): n is a, c, g, or t
  misc_feature (1186)..(1186): n is a, c, g, or t
  misc_feature (1194)..(1194): n is a, c, g, or t
  misc_feature (1203)..(1203): n is a, c, g, or t
  misc_feature (1216)..(1216): n is a, c, g, or t
  misc_feature (1218)..(1218): n is a, c, g, or t
  misc_feature (1221)..(1222): n is a, c, g, or t
  misc_feature (1245)..(1246): n is a, c, g, or t
  misc_feature (1248)..(1251): n is a, c, g, or t
  misc_feature (1254)..(1256): n is a, c, g, or t
  misc_feature (1258)..(1258): n is a, c, g, or t
  misc_feature (1261)..(1261): n is a, c, g, or t
  misc_feature (1263)..(1265): n is a, c, g, or t
  misc_feature (1269)..(1269): n is a, c, g, or t
  misc_feature (1273)..(1275): n is a, c, g, or t
  misc_feature (1279)..(1280): n is a, c, g, or t
  misc_feature (1292)..(1294): n is a, c, g, or t
  misc_feature (1298)..(1304): n is a, c, g, or t
  misc_feature (1308)..(1312): n is a, c, g, or t
  misc_feature (1316)..(1316): n is a, c, g, or t
  misc_feature (1325)..(1328): n is a, c, g, or t
  misc_feature (1336)..(1337): n is a, c, g, or t
  misc_feature (1341)..(1344): n is a, c, g, or t
  misc_feature (1347)..(1348): n is a, c, g, or t
  misc_feature (1354)..(1358): n is a, c, g, or t
  misc_feature (1362)..(1364): n is a, c, g, or t
  misc_feature (1367)..(1369): n is a, c, g, or t
  misc_feature (1371)..(1372): n is a, c, g, or t
  misc_feature (1375)..(1375): n is a, c, g, or t
  misc_feature (1381)..(1383): n is a, c, g, or t
  misc_feature (1386)..(1388): n is a, c, g, or t
  misc_feature (1391)..(1391): n is a, c, g, or t
  misc_feature (1393)..(1393): n is a, c, g, or t
tagagaaattactatgagaggatcgcatcaccatcaccatcacggatcctatttaggtgacactatagaatcgtcgacccacgcgtccgggaaacgggaactgggcttgggacaagagccatcccaagtccaaggccaagtaggctcgggagaacagggcaacatttcctaccacaggccaaggagacaaaagagatattggaaggaggggaaagagaagcccagacaaacagcagatgagttgagtggggcagagggacagggcagccagaccaaggccaagccttctcacccttggccagctggaagggacttcagcaaccaagaccacctggcaacaggctcagtgggggtcaggtccaggtccccgaagaggtgctggagaggaaagcagggagccactgcatccagcacatggggtgcctgggcctcagatggggaccccaaagaagcagaagctgaagaaggtacggctgggggttctgtcctgctcatccaaccacccctaaatacccaccctgtggactttgagctgaacatgcccactggcccccaggccacatgggacctggaggagcctacctggggcctgcccctgccagcaggtgccagggctggtgaggaagagctggggggcagaggtaaagccctgcaggggaggccacagggtccatcccgtcttcaggatcatctacactgcactaggggagccccaggaaggcagcaccctggaggccctgtgccagtgaggacaggagaccctaaggccccgggagcccagtgccagccagaggttgtgcaggcaaggagaccaaagattgatganaagacccccagcaggggtactgggtacccggcaggccagtgccctcacagttgacttggaccagggtggctgtgaanggaantctttgttgcnaaggaggangaggaaaagggaggactnggtagggtttgtttcttctgcttgtttctgtacagggcccccnaactcctggaaaaatcaagcaaggaaaacctggggcttgccntggccaaancaactcacaaatgccaatgccanttncaaggccanccnaancctgnccccttggggaatccnncctggaggcttcccctaancnccnnccttggcttggnggaagcnctnaaaaantntttcccnaattcccccccctnaantggnaaaaaaangggaaaaanccctttcaggggncnaanncctggttccccaaagggtccccnntnnnnttnnngnaangnnncccntttnnnaaannttccccccttgnnncccnnnnnnncccnnnnnaaanccccccccnnnntttttttnnaaannnnttnncccccnnnnncccnnnccnnnannttntttttnnnccnnntcntn

SEQ ID NO: 217 - DNA, 1301 bp, Homo Sapiens
  misc_feature (861)..(861): n is a, c, g, or t
  misc_feature (916)..(916): n is a, c, g, or t
  misc_feature (935)..(935): n is a, c, g, or t
  misc_feature (966)..(969): n is a, c, g, or t
  misc_feature (972)..(1059): n is a, c, g, or t
  misc_feature (1061)..(1070): n is a, c, g, or t
  misc_feature (1080)..(1081): n is a, c, g, or t
  misc_feature (1089)..(1089): n is a, c, g, or t
  misc_feature (1095)..(1096): n is a, c, g, or t
  misc_feature (1098)..(1099): n is a, c, g, or t
  misc_feature (1104)..(1105): n is a, c, g, or t
  misc_feature (1107)..(1108): n is a, c, g, or t
  misc_feature (1111)..(1113): n is a, c, g, or t
  misc_feature (1116)..(1117): n is a, c, g, or t
  misc_feature (1120)..(1120): n is a, c, g, or t
  misc_feature (1125)..(1128): n is a, c, g, or t
  misc_feature (1133)..(1133): n is a, c, g, or t
  misc_feature (1137)..(1138): n is a, c, g, or t
  misc_feature (1140)..(1140): n is a, c, g, or t
  misc_feature (1147)..(1147): n is a, c, g, or t
  misc_feature (1156)..(1158): n is a, c, g, or t
  misc_feature (1171)..(1171): n is a, c, g, or t
  misc_feature (1175)..(1175): n is a, c, g, or t
  misc_feature (1179)..(1180): n is a, c, g, or t
  misc_feature (1193)..(1193): n is a, c, g, or t
  misc_feature (1197)..(1197): n is a, c, g, or t
  misc_feature (1204)..(1208): n is a, c, g, or t
  misc_feature (1210)..(1211): n is a, c, g, or t
  misc_feature (1213)..(1213): n is a, c, g, or t
  misc_feature (1217)..(1217): n is a, c, g, or t
  misc_feature (1221)..(1221): n is a, c, g, or t
  misc_feature (1224)..(1229): n is a, c, g, or t
  misc_feature (1231)..(1234): n is a, c, g, or t
  misc_feature (1236)..(1237): n is a, c, g, or t
  misc_feature (1247)..(1250): n is a, c, g, or t
  misc_feature (1253)..(1253): n is a, c, g, or t
  misc_feature (1256)..(1257): n is a, c, g, or t
  misc_feature (1264)..(1264): n is a, c, g, or t
  misc_feature (1266)..(1268): n is a, c, g, or t
  misc_feature (1272)..(1273): n is a, c, g, or t
  misc_feature (1277)..(1280): n is a, c, g, or t
  misc_feature (1301)..(1301): n is a, c, g, or t
attagagaaattactatgagaggatcgcatcaccatcaccatcacggatcctatttaggtgacactatagaatcgtcgacccacgcgtccgtgcaggctgtgagaaacgcggggtcgcggttcctgcggtcctggacttggccccagacagccggcagggtcgtggccagaacgccggccgggaccatctgcacaggcgctcgacagctccaagacgctgcggccaagcagaaagttgaacagaacgcggctcccagccacaccaagttcagcatttaccctcccattccaggagaggagagctctctgaggtgggcaggaaagaaatttgaggagatcccaattgcacacattaaagcatcccacaacaacacacagatccaggtagtctctgctagtaatgagccccttgcctttgcttcctgtggcacagagggatttcggaatgccaagaagggcacaggcatcgcagcacagacagcaggcatagccgcagcggcgagagctaaacaaaagggcgtgatccacatccgagttgtggtgaaaggcctggggccaggacgcttgtctgccatgcacggactgatcatgggcggcctggaagtgatctcaatcacagacaacaccccaatcccacacaacggctgccgccccaggaaggctcggaagctgtgatgggaaggaggcctgcacttggacctgacctcaagcctcagctccagtgggaccttgtaaaatgctccctgtcagagctctccagaatatgcttgttggagatccttcaggcagtaagggagagttttgcctccttacacagtggccttttgcttgcacctccagctggagatgggtgtgccccanaagtaagctttgcatctcttacaagaggggagctacaggggcagccgtggcctangcccaaactctgctctganaaaataaatatctgtaccacctgttaaattnnnnaannnnnnnnnnnnnnnnnnnnnnnnnnnnnnnnnnnnnnnnnnnnnnnnnnnnnnnnnnnnnnnnnnnnnnnnnnnnnnnnnnnnnnnnannnnnnnnnnaaaagggggnnccccccanaggggnncnnaaaanntnnttnnnaannggnccccnnnnaaaancccnnangcccccnaaccccccnnnttttttaaaaacntggnggcnncggggtttttttngggnaaacccnnnnntnngngatntttnggnnnnnnannnnannggaaaaaaannnnggnaannccccgtnannncccnngggnnnnaaaaaatttttgggttttttn

SEQ ID NO: 218 - DNA, 1367 bp, Homo Sapiens
  misc_feature (2)..(2): n is a, c, g, or t
  misc_feature (932)..(932): n is a, c, g, or t
  misc_feature (968)..(968): n is a, c, g, or t
  misc_feature (985)..(985): n is a, c, g, or t
  misc_feature (987)..(987): n is a, c, g, or t
  misc_feature (990)..(990): n is a, c, g, or t
  misc_feature (1003)..(1003): n is a, c, g, or t
  misc_feature (1017)..(1017): n is a, c, g, or t
  misc_feature (1022)..(1022): n is a, c, g, or t
  misc_feature (1030)..(1031): n is a, c, g, or t
  misc_feature (1043)..(1046): n is a, c, g, or t
  misc_feature (1049)..(1050): n is a, c, g, or t
  misc_feature (1052)..(1119): n is a, c, g, or t
  misc_feature (1122)..(1161): n is a, c, g, or t
  misc_feature (1166)..(1167): n is a, c, g, or t
  misc_feature (1174)..(1176): n is a, c, g, or t
  misc_feature (1178)..(1182): n is a, c, g, or t
  misc_feature (1187)..(1187): n is a, c, g, or t
  misc_feature (1189)..(1189): n is a, c, g, or t
  misc_feature (1197)..(1202): n is a, c, g, or t
  misc_feature (1206)..(1207): n is a, c, g, or t
  misc_feature (1210)..(1212): n is a, c, g, or t
  misc_feature (1214)..(1218): n is a, c, g, or t
  misc_feature (1223)..(1226): n is a, c, g, or t
  misc_feature (1228)..(1228): n is a, c, g, or t
  misc_feature (1230)..(1230): n is a, c, g, or t
  misc_feature (1232)..(1234): n is a, c, g, or t
  misc_feature (1239)..(1239): n is a, c, g, or t
  misc_feature (1243)..(1244): n is a, c, g, or t
  misc_feature (1250)..(1251): n is a, c, g, or t
  misc_feature (1253)..(1254): n is a, c, g, or t
  misc_feature (1256)..(1256): n is a, c, g, or t
  misc_feature (1263)..(1265): n is a, c, g, or t
  misc_feature (1269)..(1269): n is a, c, g, or t
  misc_feature (1271)..(1274): n is a, c, g, or t
  misc_feature (1278)..(1278): n is a, c, g, or t
  misc_feature (1280)..(1281): n is a, c, g, or t
  misc_feature (1286)..(1299): n is a, c, g, or t
  misc_feature (1305)..(1308): n is a, c, g, or t
  misc_feature (1311)..(1312): n is a, c, g, or t
  misc_feature (1315)..(1316): n is a, c, g, or t
  misc_feature (1319)..(1320): n is a, c, g, or t
  misc_feature (1324)..(1329): n is a, c, g, or t
  misc_feature (1332)..(1332): n is a, c, g, or t
  misc_feature (1348)..(1349): n is a, c, g, or t
  misc_feature (1356)..(1359): n is a, c, g, or t
  misc_feature (1367)..(1367): n is a, c, g, or t
antagagaaattactatgagaggatcgcatcaccatcaccatcacggatcctatttaggtgacactatagaatcgtcgacccacgcgtccgagtcggccgagctggcgcgcccggagcacctgcgccccggggagggcggcgactgctgcctgcggggagaggcgaggcggccgtggttctgcggggtggatgtgtttcgtgaagacctctgtaccaagacagagaacctgctcgggagctatttccccaagaagatttctgagctggatgcatttttaaaggagccagctctcaatgaagccaacttgagcaatctgaaggccccattggacatcccagtgcctgatccagtcaaggagaaagagaaagaggagcggaagaaacagcaggagaaggaagacaaggatgaaaagaagaagggggaggatgaagacaaaggtcctccctgtggcccagtgaactgcaatgaaaagatcgtggtccttctgcagcgcttgaagcctgagatcaaggatgtcattgagcagctcaacctggtcaccacctggttgcagctgcagatacctcggattgaggatggtaacaattttggagtggctgtccaggagaaggtgtttgagctgatgaccagcctccacaccaagctagaaggcttccacactcaaatctctaagtatttctctgagcgtggtgatgcagtgactaaagcagccaagcagccccatgtgggtgattatcggcagctggtgcacgagctggatgaggcagagtaccgggacatccggctgatggtcatggagatccgcaatgcttatgctgtgttatatgacatcatcctgaagaacttcgagaagctcaagaagcccaggggagaaacaaagggaatgatctattgagagccctctctcccattctgtgatgagtacagcanagaccttcctgctttttactggggactccaaatttncccaaacttgcttctgntnganatttttcccctcnccttgcctctcagncacantaaatttnntttttccccttnnnnaannannnnnnnnnnnnnnnnnnnnnnnnnnnnnnnnnnnnnnnnnnnnnnnnnnnnnnnnnnnnnnnnnnnnccnnnnnnnnnnnnnnnnnnnnnnnnnnnnnnnnnnnnnnnnggggnnccccccnnngnnnnnaaaancntttttttnnnnnncccnnttnnncnnnnnttttnnnnancncnnnttttnaaanntttttnncnngnttttttnnnaaancnnnntttncnnttttnnnnnnnnnnnnnnaaaatnnnnttnnccnnttnntccnnnnnnaanattttttttttttttnnaaaaaannnntttttttn

SEQ ID NO: 219 - DNA, 1413 bp, Homo Sapiens
  misc_feature (802)..(802): n is a, c, g, or t
  misc_feature (845)..(845): n is a, c, g, or t
  misc_feature (865)..(865): n is a, c, g, or t
  misc_feature (885)..(885): n is a, c, g, or t
  misc_feature (900)..(900): n is a, c, g, or t
  misc_feature (903)..(903): n is a, c, g, or t
  misc_feature (913)..(913): n is a, c, g, or t
  misc_feature (930)..(930): n is a, c, g, or t
  misc_feature (935)..(935): n is a, c, g, or t
  misc_feature (954)..(954): n is a, c, g, or t
  misc_feature (968)..(968): n is a, c, g, or t
  misc_feature (976)..(976): n is a, c, g, or t
  misc_feature (978)..(978): n is a, c, g, or t
  misc_feature (987)..(987): n is a, c, g, or t
  misc_feature (989)..(989): n is a, c, g, or t
  misc_feature (1000)..(1000): n is a, c, g, or t
  misc_feature (1005)..(1005): n is a, c, g, or t
  misc_feature (1007)..(1007): n is a, c, g, or t
  misc_feature (1023)..(1024): n is a, c, g, or t
  misc_feature (1027)..(1027): n is a, c, g, or t
  misc_feature (1030)..(1030): n is a, c, g, or t
  misc_feature (1032)..(1032): n is a, c, g, or t
  misc_feature (1036)..(1036): n is a, c, g, or t
  misc_feature (1042)..(1042): n is a, c, g, or t
  misc_feature (1053)..(1053): n is a, c, g, or t
  misc_feature (1057)..(1057): n is a, c, g, or t
  misc_feature (1061)..(1061): n is a, c, g, or t
  misc_feature (1064)..(1064): n is a, c, g, or t
  misc_feature (1067)..(1067): n is a, c, g, or t
  misc_feature (1069)..(1069): n is a, c, g, or t
  misc_feature (1072)..(1072): n is a, c, g, or t
  misc_feature (1074)..(1075): n is a, c, g, or t
  misc_feature (1083)..(1085): n is a, c, g, or t
  misc_feature (1088)..(1089): n is a, c, g, or t
  misc_feature (1091)..(1093): n is a, c, g, or t
  misc_feature (1095)..(1096): n is a, c, g, or t
  misc_feature (1102)..(1102): n is a, c, g, or t
  misc_feature (1105)..(1106): n is a, c, g, or t
  misc_feature (1108)..(1110): n is a, c, g, or t
  misc_feature (1116)..(1116): n is a, c, g, or t
  misc_feature (1124)..(1125): n is a, c, g, or t
  misc_feature (1129)..(1130): n is a, c, g, or t
  misc_feature (1134)..(1134): n is a, c, g, or t
  misc_feature (1139)..(1139): n is a, c, g, or t
  misc_feature (1144)..(1144): n is a, c, g, or t
  misc_feature (1147)..(1148): n is a, c, g, or t
  misc_feature (1153)..(1153): n is a, c, g, or t
  misc_feature (1156)..(1158): n is a, c, g, or t
  misc_feature (1160)..(1161): n is a, c, g, or t
  misc_feature (1166)..(1167): n is a, c, g, or t
  misc_feature (1170)..(1170): n is a, c, g, or t
  misc_feature (1172)..(1174): n is a, c, g, or t
  misc_feature (1184)..(1186): n is a, c, g, or t
  misc_feature (1188)..(1191): n is a, c, g, or t
  misc_feature (1193)..(1196): n is a, c, g, or t
  misc_feature (1200)..(1201): n is a, c, g, or t
  misc_feature (1203)..(1203): n is a, c, g, or t
  misc_feature (1205)..(1206): n is a, c, g, or t
  misc_feature (1209)..(1209): n is a, c, g, or t
  misc_feature (1212)..(1213): n is a, c, g, or t
  misc_feature (1217)..(1218): n is a, c, g, or t
  misc_feature (1221)..(1228): n is a, c, g, or t
  misc_feature (1232)..(1233): n is a, c, g, or t
  misc_feature (1236)..(1237): n is a, c, g, or t
  misc_feature (1239)..(1242): n is a, c, g, or t
  misc_feature (1247)..(1248): n is a, c, g, or t
  misc_feature (1252)..(1253): n is a, c, g, or t
  misc_feature (1258)..(1259): n is a, c, g, or t
  misc_feature (1261)..(1263): n is a, c, g, or t
  misc_feature (1266)..(1278): n is a, c, g, or t
  misc_feature (1280)..(1280): n is a, c, g, or t
  misc_feature (1282)..(1282): n is a, c, g, or t
  misc_feature (1284)..(1286): n is a, c, g, or t
  misc_feature (1290)..(1296): n is a, c, g, or t
  misc_feature (1298)..(1299): n is a, c, g, or t
  misc_feature (1301)..(1301): n is a, c, g, or t
  misc_feature (1306)..(1310): n is a, c, g, or t
  misc_feature (1314)..(1314): n is a, c, g, or t
  misc_feature (1316)..(1329): n is a, c, g, or t
  misc_feature (1331)..(1338): n is a, c, g, or t
  misc_feature (1344)..(1353): n is a, c, g, or t
  misc_feature (1355)..(1355): n is a, c, g, or t
  misc_feature (1357)..(1357): n is a, c, g, or t
  misc_feature (1359)..(1359): n is a, c, g, or t
  misc_feature (1361)..(1362): n is a, c, g, or t
  misc_feature (1364)..(1374): n is a, c, g, or t
  misc_feature (1378)..(1381): n is a, c, g, or t
  misc_feature (1383)..(1392): n is a, c, g, or t
  misc_feature (1396)..(1397): n is a, c, g, or t
  misc_feature (1399)..(1406): n is a, c, g, or t
  misc_feature (1408)..(1408): n is a, c, g, or t
  misc_feature (1410)..(1410): n is a, c, g, or t
tagagagattactatgagaggatcgcatcaccatcaccatcacggatcctatttaggtgacactatagaatcgtcgacccacgcgtccgcgctgttcacgtcccgtcggcctcctgcacagcccacacgctgcgcccggaaggcccctgctgtggagaagccggacccatccccgaggtccccagcgaggacacacactccacgagagcagcccctccactctgcccaggagaggggccgaccctcctcgggaaccggccacccgcgtggctcccagcatccatcaggacaagcccacgtggggtcctccctgcgtgctcagagggtctgtccagccctgggaagcgaccttggcctcagttcacagcctggtgctcatctgctggcaccgggcatccacccatcagcccccgccctgtccctccgaaggacacccagcaggcaccccccggggaggcaggggcagaggtcagaaggggtgtctgggacctggatggccagcagggacaggggcattgtcatctcaaaggcccaacccccagaggccacaccagtcctcccagggagtcctcgagtcgccctgcccagagccctggcaccagagacgccaagagcctgtggggtgactcggagcagcaggtgtggccccgggcgggcggcaccgcgtccagggcagcctccctccgctgagtgacacgggacaccagtgcccggccgacgcgcctttgcaggagaaatgtgcaaacctctgtggataccatttcatttccattcttgtgttgtctccaaggcccctttgganatatacttggtgttggttgtgtttttttggttccttttcaaanaactgtaaaccgaggctgangtgctccactgactgtgccnaggggcggggggcangangacggcaaanctatttataatatttancgaanttcggtctcccttcaaatnccccgcgagggaangttgctgnanccaccccgntntcccccatganaaaantntgtaaataccttgggnnaanaangnccanttcccntcctggggtcncctntganggntgntngtncnntgaaaaannnggnnannntnnaaattnttnnannnaaaaanaaaaaggnntttnntttnaaatnaaaanggnnaaaanttnnntnnttttnnggnannnttttttcccnnnannnntnnnnaaanntncnnttnccnnaaanntgnnnnnnnnaaanntcnntnnnnggggnntttnnaaggnnannnttnnnnnnnnnnnnncncncnnnaaannnnnnncnntntcttnnnnngggntnnnnnnnnnnnnnncnnnnnnnntttttnnnnnnnnnntnananannannnnnnnnnnntttnnnncnnnnnnnnnntttnncnnnnnnnngngnaaa

SEQ ID NO: 220 - DNA, 1410 bp, Homo Sapiens
  misc_feature (589)..(589): n is a, c, g, or t
  misc_feature (643)..(643): n is a, c, g, or t
  misc_feature (646)..(646): n is a, c, g, or t
  misc_feature (677)..(677): n is a, c, g, or t
  misc_feature (682)..(682): n is a, c, g, or t
  misc_feature (710)..(710): n is a, c, g, or t
  misc_feature (712)..(712): n is a, c, g, or t
  misc_feature (714)..(714): n is a, c, g, or t
  misc_feature (738)..(738): n is a, c, g, or t
  misc_feature (746)..(746): n is a, c, g, or t
  misc_feature (759)..(759): n is a, c, g, or t
  misc_feature (764)..(764): n is a, c, g, or t
  misc_feature (767)..(767): n is a, c, g, or t
  misc_feature (773)..(773): n is a, c, g, or t
  misc_feature (777)..(779): n is a, c, g, or t
  misc_feature (793)..(793): n is a, c, g, or t
  misc_feature (797)..(797): n is a, c, g, or t
  misc_feature (807)..(807): n is a, c, g, or t
  misc_feature (812)..(813): n is a, c, g, or t
  misc_feature (821)..(821): n is a, c, g, or t
  misc_feature (823)..(823): n is a, c, g, or t
  misc_feature (828)..(828): n is a, c, g, or t
  misc_feature (831)..(831): n is a, c, g, or t
  misc_feature (835)..(835): n is a, c, g, or t
  misc_feature (840)..(840): n is a, c, g, or t
  misc_feature (844)..(845): n is a, c, g, or t
  misc_feature (847)..(847): n is a, c, g, or t
  misc_feature (851)..(851): n is a, c, g, or t
  misc_feature (853)..(853): n is a, c, g, or t
  misc_feature (855)..(856): n is a, c, g, or t
  misc_feature (859)..(860): n is a, c, g, or t
  misc_feature (865)..(865): n is a, c, g, or t
  misc_feature (871)..(871): n is a, c, g, or t
  misc_feature (880)..(880): n is a, c, g, or t
  misc_feature (882)..(882): n is a, c, g, or t
  misc_feature (887)..(887): n is a, c, g, or t
  misc_feature (889)..(892): n is a, c, g, or t
  misc_feature (895)..(895): n is a, c, g, or t
  misc_feature (898)..(898): n is a, c, g, or t
  misc_feature (901)..(901): n is a, c, g, or t
  misc_feature (904)..(905): n is a, c, g, or t
  misc_feature (907)..(907): n is a, c, g, or t
  misc_feature (914)..(914): n is a, c, g, or t
  misc_feature (919)..(920): n is a, c, g, or t
  misc_feature (929)..(929): n is a, c, g, or t
  misc_feature (932)..(933): n is a, c, g, or t
  misc_feature (936)..(936): n is a, c, g, or t
  misc_feature (938)..(939): n is a, c, g, or t
  misc_feature (948)..(948): n is a, c, g, or t
  misc_feature (954)..(955): n is a, c, g, or t
  misc_feature (958)..(959): n is a, c, g, or t
  misc_feature (967)..(968): n is a, c, g, or t
  misc_feature (970)..(970): n is a, c, g, or t
  misc_feature (972)..(972): n is a, c, g, or t
  misc_feature (978)..(980): n is a, c, g, or t
  misc_feature (982)..(982): n is a, c, g, or t
  misc_feature (987)..(987): n is a, c, g, or t
  misc_feature (1000)..(1000): n is a, c, g, or t
  misc_feature (1002)..(1002): n is a, c, g, or t
  misc_feature (1005)..(1006): n is a, c, g, or t
  misc_feature (1016)..(1016): n is a, c, g, or t
  misc_feature (1021)..(1023): n is a, c, g, or t
  misc_feature (1026)..(1026): n is a, c, g, or t
  misc_feature (1030)..(1030): n is a, c, g, or t
  misc_feature (1034)..(1035): n is a, c, g, or t
  misc_feature (1038)..(1038): n is a, c, g, or t
  misc_feature (1041)..(1041): n is a, c, g, or t
  misc_feature (1043)..(1047): n is a, c, g, or t
  misc_feature (1050)..(1051): n is a, c, g, or t
  misc_feature (1053)..(1053): n is a, c, g, or t
  misc_feature (1067)..(1068): n is a, c, g, or t
  misc_feature (1072)..(1073): n is a, c, g, or t
  misc_feature (1076)..(1078): n is a, c, g, or t
  misc_feature (1089)..(1090): n is a, c, g, or t
  misc_feature (1094)..(1098): n is a, c, g, or t
  misc_feature (1102)..(1102): n is a, c, g, or t
  misc_feature (1110)..(1111): n is a, c, g, or t
  misc_feature (1115)..(1115): n is a, c, g, or t
  misc_feature (1118)..(1119): n is a, c, g, or t
  misc_feature (1123)..(1123): n is a, c, g, or t
  misc_feature (1126)..(1127): n is a, c, g, or t
  misc_feature (1133)..(1134): n is a, c, g, or t
  misc_feature (1136)..(1137): n is a, c, g, or t
  misc_feature (1142)..(1145): n is a, c, g, or t
  misc_feature (1147)..(1148): n is a, c, g, or t
  misc_feature (1150)..(1150): n is a, c, g, or t
  misc_feature (1153)..(1154): n is a, c, g, or t
  misc_feature (1161)..(1163): n is a, c, g, or t
  misc_feature (1165)..(1165): n is a, c, g, or t
  misc_feature (1168)..(1168): n is a, c, g, or t
  misc_feature (1170)..(1170): n is a, c, g, or t
  misc_feature (1173)..(1175): n is a, c, g, or t
  misc_feature (1177)..(1178): n is a, c, g, or t
  misc_feature (1180)..(1181): n is a, c, g, or t
  misc_feature (1186)..(1191): n is a, c, g, or t
  misc_feature (1194)..(1194): n is a, c, g, or t
  misc_feature (1196)..(1196): n is a, c, g, or t
  misc_feature (1203)..(1203): n is a, c, g, or t
  misc_feature (1205)..(1205): n is a, c, g, or t
  misc_feature (1208)..(1208): n is a, c, g, or t
  misc_feature (1210)..(1213): n is a, c, g, or t
  misc_feature (1215)..(1215): n is a, c, g, or t
  misc_feature (1217)..(1218): n is a, c, g, or t
  misc_feature (1220)..(1222): n is a, c, g, or t
  misc_feature (1225)..(1227): n is a, c, g, or t
  misc_feature (1232)..(1236): n is a, c, g, or t
  misc_feature (1240)..(1245): n is a, c, g, or t
  misc_feature (1250)..(1251): n is a, c, g, or t
  misc_feature (1254)..(1256): n is a, c, g, or t
  misc_feature (1258)..(1260): n is a, c, g, or t
  misc_feature (1262)..(1264): n is a, c, g, or t
  misc_feature (1266)..(1271): n is a, c, g, or t
  misc_feature (1278)..(1280): n is a, c, g, or t
  misc_feature (1282)..(1287): n is a, c, g, or t
  misc_feature (1289)..(1294): n is a, c, g, or t
  misc_feature (1297)..(1302): n is a, c, g, or t
  misc_feature (1305)..(1308): n is a, c, g, or t
  misc_feature (1310)..(1313): n is a, c, g, or t
  misc_feature (1315)..(1315): n is a, c, g, or t
  misc_feature (1319)..(1326): n is a, c, g, or t
  misc_feature (1328)..(1332): n is a, c, g, or t
  misc_feature (1335)..(1336): n is a, c, g, or t
  misc_feature (1339)..(1343): n is a, c, g, or t
  misc_feature (1345)..(1346): n is a, c, g, or t
  misc_feature (1351)..(1351): n is a, c, g, or t
  misc_feature (1353)..(1354): n is a, c, g, or t
  misc_feature (1356)..(1357): n is a, c, g, or t
  misc_feature (1359)..(1366): n is a, c, g, or t
  misc_feature (1368)..(1368): n is a, c, g, or t
  misc_feature (1370)..(1370): n is a, c, g, or t
  misc_feature (1373)..(1373): n is a, c, g, or t
  misc_feature (1376)..(1376): n is a, c, g, or t
  misc_feature (1378)..(1380): n is a, c, g, or t
  misc_feature (1382)..(1388): n is a, c, g, or t
  misc_feature (1390)..(1394): n is a, c, g, or t
  misc_feature (1396)..(1397): n is a, c, g, or t
  misc_feature (1399)..(1404): n is a, c, g, or t
  misc_feature (1406)..(1408): n is a, c, g, or t
tagagagattactatgagaggatcgcatcaccatcaccatcacgggatcctatttaggtgacactatagaatcgtcgacccacgcgtccgctctgttcacttgcagataccatacagagccttcattcattcattcattgacaatgaatgtggggtgcccctctgtaaccagacctggatcaagacgcctgcctccccagactcagccactgcccacttcagcttctgccggaccctcctggagcacacggtgtcagctgagagcatcccctgccacttgcctcggacacctggcaccagcctcacgtggcatgactcccgcagccagagggcggccagcagcaggccaatcaagctcctgcagcagcccggcacagacaccccccagggccggctgtactctgaccactatggcctgtaccatacaagcccctcgctgggtggcctgacccggcccgtggtcctgtggagtcagcaggacgtctgcaagtggctcaagaagcactgtccccacaactacctcgtctacgtggaggccttctcccagcatgccatcaccggccgggcactgctgcggctgaatgcgganaagctgcagcggatggggctggcccaggaggcccaaaggcaggaggtgctgcancangtgctccgcctgcaagtgcgtgaggaagggncgaancctgcaactgctcaccaaagcttccttncngnaaaaaagtcctaactgctgctgangcttgaanccaaaaccccaanactgngangggaantccnnnggcttaaggaaggnaagnccaaactggnccccnnaaactccntntttgnaancctngaggnaatnncngggncngnncannctggncccaangaaaaaaanangaacnannnncanccnctnccnngncccctcntggtnngaaaatttnaanntcnannccctagggnctggannggnnaaagggcnntnanttaaannngnccccnccctcctgggaantnganncccaaccccnccccnnnganaaantatnnaanatntnnnnnaanntncctttaaaaaaaannattnnaannnccccaaaaaannccannnnnacanttttaatnnaatnccnnaccnaannaaggtnnanncccannnnanntntannatacttnnntnatnanccnnnanntnnatttnnnnnnttncncaaaaanantantnnnnanannannnatnnnaatannnnnacannnnnntaaannttnnncnnntnnntnnnnnntacaatnnnannnnnnannnnnnaannnnnntannnnannnncnaatnnnnnnnnannnnnaannttnnnnntnntattnanntnnannnnnnnncntntantanannnannnnnnnannnnntnntnnnnnnannnat

SEQ ID NO: 221 - DNA, 1521 bp, Homo Sapiens
  misc_feature (1)..(1): n is a, c, g, or t
  misc_feature (14)..(14): n is a, c, g, or t
  misc_feature (364)..(364): n is a, c, g, or t
  misc_feature (388)..(388): n is a, c, g, or t
  misc_feature (399)..(399): n is a, c, g, or t
  misc_feature (407)..(407): n is a, c, g, or t
  misc_feature (411)..(411): n is a, c, g, or t
  misc_feature (431)..(431): n is a, c, g, or t
  misc_feature (483)..(483): n is a, c, g, or t
  misc_feature (485)..(485): n is a, c, g, or t
  misc_feature (487)..(487): n is a, c, g, or t
  misc_feature (489)..(489): n is a, c, g, or t
  misc_feature (491)..(491): n is a, c, g, or t
  misc_feature (496)..(496): n is a, c, g, or t
  misc_feature (505)..(505): n is a, c, g, or t
  misc_feature (508)..(508): n is a, c, g, or t
  misc_feature (515)..(515): n is a, c, g, or t
  misc_feature (519)..(520): n is a, c, g, or t
  misc_feature (537)..(538): n is a, c, g, or t
  misc_feature (546)..(546): n is a, c, g, or t
  misc_feature (556)..(556): n is a, c, g, or t
  misc_feature (570)..(572): n is a, c, g, or t
  misc_feature (583)..(583): n is a, c, g, or t
  misc_feature (587)..(589): n is a, c, g, or t
  misc_feature (595)..(596): n is a, c, g, or t
  misc_feature (598)..(598): n is a, c, g, or t
  misc_feature (601)..(601): n is a, c, g, or t
  misc_feature (603)..(603): n is a, c, g, or t
  misc_feature (605)..(606): n is a, c, g, or t
  misc_feature (617)..(617): n is a, c, g, or t
  misc_feature (622)..(622): n is a, c, g, or t
  misc_feature (630)..(630): n is a, c, g, or t
  misc_feature (656)..(656): n is a, c, g, or t
  misc_feature (660)..(660): n is a, c, g, or t
  misc_feature (662)..(662): n is a, c, g, or t
  misc_feature (667)..(667): n is a, c, g, or t
  misc_feature (673)..(673): n is a, c, g, or t
  misc_feature (675)..(675): n is a, c, g, or t
  misc_feature (680)..(680): n is a, c, g, or t
  misc_feature (684)..(684): n is a, c, g, or t
  misc_feature (686)..(686): n is a, c, g, or t
  misc_feature (688)..(688): n is a, c, g, or t
  misc_feature (690)..(690): n is a, c, g, or t
  misc_feature (692)..(694): n is a, c, g, or t
  misc_feature (699)..(699): n is a, c, g, or t
  misc_feature (718)..(718): n is a, c, g, or t
  misc_feature (729)..(730): n is a, c, g, or t
  misc_feature (733)..(733): n is a, c, g, or t
  misc_feature (735)..(735): n is a, c, g, or t
  misc_feature (741)..(741): n is a, c, g, or t
  misc_feature (746)..(746): n is a, c, g, or t
  misc_feature (749)..(749): n is a, c, g, or t
  misc_feature (757)..(757): n is a, c, g, or t
  misc_feature (760)..(760): n is a, c, g, or t
  misc_feature (763)..(763): n is a, c, g, or t
  misc_feature (769)..(769): n is a, c, g, or t
  misc_feature (772)..(772): n is a, c, g, or t
  misc_feature (777)..(777): n is a, c, g, or t
  misc_feature (782)..(782): n is a, c, g, or t
  misc_feature (788)..(788): n is a, c, g, or t
  misc_feature (795)..(798): n is a, c, g, or t
  misc_feature (800)..(801): n is a, c, g, or t
  misc_feature (806)..(806): n is a, c, g, or t
  misc_feature (808)..(808): n is a, c, g, or t
  misc_feature (810)..(810): n is a, c, g, or t
  misc_feature (812)..(812): n is a, c, g, or t
  misc_feature (825)..(825): n is a, c, g, or t
  misc_feature (830)..(830): n is a, c, g, or t
  misc_feature (838)..(838): n is a, c, g, or t
  misc_feature (841)..(842): n is a, c, g, or t
  misc_feature (845)..(845): n is a, c, g, or t
  misc_feature (851)..(852): n is a, c, g, or t
  misc_feature (858)..(858): n is a, c, g, or t
  misc_feature (862)..(864): n is a, c, g, or t
  misc_feature (867)..(867): n is a, c, g, or t
  misc_feature (869)..(869): n is a, c, g, or t
  misc_feature (871)..(871): n is a, c, g, or t
  misc_feature (883)..(884): n is a, c, g, or t
  misc_feature (888)..(888): n is a, c, g, or t
  misc_feature (890)..(890): n is a, c, g, or t
  misc_feature (893)..(893): n is a, c, g, or t
  misc_feature (895)..(895): n is a, c, g, or t
  misc_feature (899)..(899): n is a, c, g, or t
  misc_feature (901)..(901): n is a, c, g, or t
  misc_feature (903)..(904): n is a, c, g, or t
  misc_feature (908)..(908): n is a, c, g, or t
  misc_feature (915)..(915): n is a, c, g, or t
  misc_feature (921)..(921): n is a, c, g, or t
  misc_feature (924)..(924): n is a, c, g, or t
  misc_feature (929)..(930): n is a, c, g, or t
  misc_feature (949)..(950): n is a, c, g, or t
  misc_feature (955)..(955): n is a, c, g, or t
  misc_feature (960)..(960): n is a, c, g, or t
  misc_feature (962)..(962): n is a, c, g, or t
  misc_feature (965)..(966): n is a, c, g, or t
  misc_feature (968)..(971): n is a, c, g, or t
  misc_feature (976)..(976): n is a, c, g, or t
  misc_feature (980)..(980): n is a, c, g, or t
  misc_feature (982)..(983): n is a, c, g, or t
  misc_feature (985)..(985): n is a, c, g, or t
  misc_feature (988)..(988): n is a, c, g, or t
  misc_feature (992)..(993): n is a, c, g, or t
  misc_feature (995)..(995): n is a, c, g, or t
  misc_feature (997)..(997): n is a, c, g, or t
  misc_feature (999)..(999): n is a, c, g, or t
  misc_feature (1007)..(1007): n is a, c, g, or t
  misc_feature (1009)..(1010): n is a, c, g, or t
  misc_feature (1013)..(1013): n is a, c, g, or t
  misc_feature (1016)..(1016): n is a, c, g, or t
  misc_feature (1020)..(1020): n is a, c, g, or t
  misc_feature (1022)..(1022): n is a, c, g, or t
  misc_feature (1025)..(1025): n is a, c, g, or t
  misc_feature (1027)..(1027): n is a, c, g, or t
  misc_feature (1029)..(1031): n is a, c, g, or t
  misc_feature (1038)..(1038): n is a, c, g, or t
  misc_feature (1043)..(1043): n is a, c, g, or t
  misc_feature (1045)..(1045): n is a, c, g, or t
  misc_feature (1050)..(1050): n is a, c, g, or t
  misc_feature (1053)..(1054): n is a, c, g, or t
  misc_feature (1064)..(1064): n is a, c, g, or t
  misc_feature (1067)..(1067): n is a, c, g, or t
  misc_feature (1069)..(1071): n is a, c, g, or t
  misc_feature (1075)..(1075): n is a, c, g, or t
  misc_feature (1078)..(1078): n is a, c, g, or t
  misc_feature (1083)..(1083): n is a, c, g, or t
  misc_feature (1085)..(1085): n is a, c, g, or t
  misc_feature (1088)..(1088): n is a, c, g, or t
  misc_feature (1092)..(1093): n is a, c, g, or t
  misc_feature (1098)..(1098): n is a, c, g, or t
  misc_feature (1100)..(1100): n is a, c, g, or t
  misc_feature (1103)..(1104): n is a, c, g, or t
  misc_feature (1106)..(1106): n is a, c, g, or t
  misc_feature (1108)..(1109): n is a, c, g, or t
  misc_feature (1119)..(1119): n is a, c, g, or t
  misc_feature (1124)..(1124): n is a, c, g, or t
  misc_feature (1126)..(1126): n is a, c, g, or t
  misc_feature (1130)..(1131): n is a, c, g, or t
  misc_feature (1139)..(1139): n is a, c, g, or t
  misc_feature (1147)..(1148): n is a, c, g, or t
  misc_feature (1152)..(1152): n is a, c, g, or t
  misc_feature (1157)..(1157): n is a, c, g, or t
  misc_feature (1162)..(1162): n is a, c, g, or t
  misc_feature (1165)..(1165): n is a, c, g, or t
  misc_feature (1170)..(1171): n is a, c, g, or t
  misc_feature (1174)..(1174): n is a, c, g, or t
  misc_feature (1176)..(1177): n is a, c, g, or t
  misc_feature (1181)..(1182): n is a, c, g, or t
  misc_feature (1184)..(1184): n is a, c, g, or t
  misc_feature (1187)..(1187): n is a, c, g, or t
  misc_feature (1189)..(1189): n is a, c, g, or t
  misc_feature (1191)..(1191): n is a, c, g, or t
  misc_feature (1195)..(1195): n is a, c, g, or t
  misc_feature (1198)..(1198): n is a, c, g, or t
  misc_feature (1218)..(1218): n is a, c, g, or t
  misc_feature (1220)..(1221): n is a, c, g, or t
  misc_feature (1223)..(1223): n is a, c, g, or t
  misc_feature (1226)..(1226): n is a, c, g, or t
  misc_feature (1230)..(1232): n is a, c, g, or t
  misc_feature (1234)..(1234): n is a, c, g, or t
  misc_feature (1242)..(1243): n is a, c, g, or t
  misc_feature (1249)..(1249): n is a, c, g, or t
  misc_feature (1251)..(1253): n is a, c, g, or t
  misc_feature (1260)..(1260): n is a, c, g, or t
  misc_feature (1263)..(1266): n is a, c, g, or t
  misc_feature (1269)..(1270): n is a, c, g, or t
  misc_feature (1274)..(1274): n is a, c, g, or t
  misc_feature (1276)..(1276): n is a, c, g, or t
  misc_feature (1278)..(1279): n is a, c, g, or t
  misc_feature (1282)..(1284): n is a, c, g, or t
  misc_feature (1286)..(1287): n is a, c, g, or t
  misc_feature (1289)..(1290): n is a, c, g, or t
  misc_feature (1297)..(1297): n is a, c, g, or t
  misc_feature (1302)..(1303): n is a, c, g, or t
  misc_feature (1307)..(1309): n is a, c, g, or t
  misc_feature (1316)..(1316): n is a, c, g, or t
  misc_feature (1319)..(1319): n is a, c, g, or t
  misc_feature (1324)..(1325): n is a, c, g, or t
  misc_feature (1328)..(1328): n is a, c, g, or t
  misc_feature (1335)..(1335): n is a, c, g, or t
  misc_feature (1337)..(1337): n is a, c, g, or t
  misc_feature (1344)..(1344): n is a, c, g, or t
  misc_feature (1348)..(1348): n is a, c, g, or t
  misc_feature (1351)..(1351): n is a, c, g, or t
  misc_feature (1356)..(1357): n is a, c, g, or t
  misc_feature (1376)..(1376): n is a, c, g, or t
  misc_feature (1379)..(1379): n is a, c, g, or t
  misc_feature (1381)..(1381): n is a, c, g, or t
  misc_feature (1385)..(1386): n is a, c, g, or t
  misc_feature (1396)..(1396): n is a, c, g, or t
  misc_feature (1398)..(1398): n is a, c, g, or t
  misc_feature (1404)..(1404): n is a, c, g, or t
  misc_feature (1406)..(1406): n is a, c, g, or t
  misc_feature (1410)..(1410): n is a, c, g, or t
  misc_feature (1412)..(1412): n is a, c, g, or t
  misc_feature (1414)..(1414): n is a, c, g, or t
  misc_feature (1419)..(1419): n is a, c, g, or t
  misc_feature (1423)..(1423): n is a, c, g, or t
  misc_feature (1427)..(1428): n is a, c, g, or t
  misc_feature (1430)..(1430): n is a, c, g, or t
  misc_feature (1439)..(1439): n is a, c, g, or t
  misc_feature (1443)..(1443): n is a, c, g, or t
  misc_feature (1446)..(1446): n is a, c, g, or t
  misc_feature (1450)..(1451): n is a, c, g, or t
  misc_feature (1459)..(1459): n is a, c, g, or t
  misc_feature (1461)..(1461): n is a, c, g, or t
  misc_feature (1463)..(1463): n is a, c, g, or t
  misc_feature (1471)..(1471): n is a, c, g, or t
  misc_feature (1475)..(1475): n is a, c, g, or t
  misc_feature (1478)..(1478): n is a, c, g, or t
  misc_feature (1480)..(1481): n is a, c, g, or t
  misc_feature (1483)..(1486): n is a, c, g, or t
  misc_feature (1488)..(1488): n is a, c, g, or t
  misc_feature (1494)..(1494): n is a, c, g, or t
  misc_feature (1499)..(1499): n is a, c, g, or t
  misc_feature (1502)..(1502): n is a, c, g, or t
  misc_feature (1510)..(1511): n is a, c, g, or t
  misc_feature (1520)..(1520): n is a, c, g, or t
ncatttagagaganttactatgagaggatcgcatcaccatcaccatcacggatcctatttaggtgacactatagaatcgtcgacccacgcgtccgcccacgcgtccggggcgccgcgggtgccggtgagaggagcagggccggtcctggggacccgcttcgggggtgggaaggggctgcgaggcggggtcctgctccctcccagcggaaggcggcctgggacccagtcagaccgcggtgcatcccaaacctcccagcgacccttggttggagaaacgggcagagaccctgcagggggtggcccgggccctgcgtgtcctctggggcctttgccgcggcccctccggcgccccgcaccccactgnaagtgctctgtgtgggtgggaagntcatccctgcncggtggcnccangaagtgctgaaatgaacgangtcccctggtccccgtccccggggcctccgagactaaaaggacccgcagcancntnangntgccncaagctggnggnggtcccnaaanncgactcccaaatccctnnttcccaantggagtgaanaataaccctctcannnttgatttcctnaccnnntagaannanagngncnnaaaatttttcnatggnattttaanttttttaaaaacaaatgttcttaagncctntnttttnaaaatntnaaatnttanantnanannnaccgnttttttggaaaatcaaaancttttattacnnaantncttacncaaanaangaaaaaantanccngattangtnaaaanaatantgaaanagcctcnnnnanntagcntncntnttttccccaatancattncccaaatntcnnttnatctannttaaantttnnnaancngnaaaaaataaaanngatntnacnancacncncnnaaanaaaaaanaagaanttnaagannaaaatcaaaaaaatcaaanntcttnaaaantnagnnannnnctttntaananncnatnattnncnantntcattttnannagnatnaaananctncncnnntttaatnaaaancncatcncgnnttatttttcnaangnnnactngtnaatananctnaatnncttantntcnntnanntaagagatanaattntngtannttcccaanataccccnnattnttttnataanaantcttnnctncnnttcnncntanananttanatntaaaaaaactatttaaatcnannanatnctannnanaacaaatnntaaatntnnnaaattantcnnnntannctancnannaannnanntnncatcttntctanncatnnnacacaanaantacgnnaanatcaatncngcattanattnatnctatnnagtcaacaaaacaacattnttncnattnnatatcatatntnatcatntncatnantnctatnattnaatnntnatagtctanctanacnattnnacctcaanancncatatttncgtnaananncnnnnanacattnaactncanctctaatnnttagatacna

SEQ ID NO: 222 - DNA, 1363 bp, Homo Sapiens
  misc_feature (1)..(1): n is a, c, g, or t
  misc_feature (878)..(878): n is a, c, g, or t
  misc_feature (970)..(970): n is a, c, g, or t
  misc_feature (1006)..(1006): n is a, c, g, or t
  misc_feature (1020)..(1020): n is a, c, g, or t
  misc_feature (1033)..(1033): n is a, c, g, or t
  misc_feature (1045)..(1045): n is a, c, g, or t
  misc_feature (1067)..(1067): n is a, c, g, or t
  misc_feature (1076)..(1076): n is a, c, g, or t
  misc_feature (1081)..(1081): n is a, c, g, or t
  misc_feature (1084)..(1084): n is a, c, g, or t
  misc_feature (1100)..(1100): n is a, c, g, or t
  misc_feature (1108)..(1108): n is a, c, g, or t
  misc_feature (1111)..(1111): n is a, c, g, or t
  misc_feature (1117)..(1118): n is a, c, g, or t
  misc_feature (1129)..(1131): n is a, c, g, or t
  misc_feature (1138)..(1138): n is a, c, g, or t
  misc_feature (1142)..(1143): n is a, c, g, or t
  misc_feature (1158)..(1159): n is a, c, g, or t
  misc_feature (1161)..(1161): n is a, c, g, or t
  misc_feature (1169)..(1169): n is a, c, g, or t
  misc_feature (1171)..(1171): n is a, c, g, or t
  misc_feature (1175)..(1175): n is a, c, g, or t
  misc_feature (1182)..(1182): n is a, c, g, or t
  misc_feature (1191)..(1191): n is a, c, g, or t
  misc_feature (1201)..(1201): n is a, c, g, or t
  misc_feature (1207)..(1207): n is a, c, g, or t
  misc_feature (1211)..(1212): n is a, c, g, or t
  misc_feature (1223)..(1224): n is a, c, g, or t
  misc_feature (1228)..(1228): n is a, c, g, or t
  misc_feature (1235)..(1235): n is a, c, g, or t
  misc_feature (1242)..(1243): n is a, c, g, or t
  misc_feature (1245)..(1245): n is a, c, g, or t
  misc_feature (1253)..(1253): n is a, c, g, or t
  misc_feature (1255)..(1255): n is a, c, g, or t
  misc_feature (1260)..(1260): n is a, c, g, or t
  misc_feature (1262)..(1263): n is a, c, g, or t
  misc_feature (1267)..(1267): n is a, c, g, or t
  misc_feature (1272)..(1272): n is a, c, g, or t
  misc_feature (1275)..(1277): n is a, c, g, or t
  misc_feature (1284)..(1285): n is a, c, g, or t
  misc_feature (1287)..(1288): n is a, c, g, or t
  misc_feature (1293)..(1294): n is a, c, g, or t
  misc_feature (1296)..(1296): n is a, c, g, or t
  misc_feature (1309)..(1309): n is a, c, g, or t
  misc_feature (1325)..(1328): n is a, c, g, or t
  misc_feature (1337)..(1338): n is a, c, g, or t
  misc_feature (1340)..(1340): n is a, c, g, or t
  misc_feature (1348)..(1348): n is a, c, g, or t
  misc_feature (1363)..(1363): n is a, c, g, or t
naattagagaaattactatgaagaggatcgcatcaccatcaccatcacggatcctatttaggtgacactatagaatcgtcgacccacgcgtccggagcgccggcaagagctcggtgctggagaacttcgtgggccgggacttccttccccgcggttcaggaatcgtcacccggcggcctctcattctgcagctcatcttctcaaaaacagaacatgccgagtttttgcactgcaagtccaaaaagtttacagactttgatgaagtccggcaggagattgaagcagagaccgacagggtcacggggaccaacaaaggcatctccccagtgcccatcaaccttcgagtctactcgccacacgtgttgaacttgaccctcatcgacctcccgggtatcaccaaggtgcctgtgggcgaccagcctccagacatcgagtaccagatcaaggacatgatcctgcagttcatcagccgggagagcagcctcattctggctgtcacgcccgccaacatggacctggccaactccgacgccctcaagctggccaaggaagtcgatccccaaggcctacggaccatcggtgtcatcaccaagcttgacctgatggacgagggcaccgacgccagggacgtcttggagaacaagttgctcccgttgagaagaggctacattggcgtggtgaaccgcagccagaaggatattgagggcaagaaggacatccgtgcagcactggcagctgagaggaagttcttcctctcccacccggcctaccggcacatggccgaccgcatgggcacgccacatctgcagaagacgctgaatcagcaactgaccaaccacatccgggagtcgctgccggccctacgtagcaaactacanagccagctgctgtccctggagaaggaggtggaggagtacaaaaaacttttcggcccgacaaccccacccgcaaaaccaaagccctgctgcanatggtccaacaatttggggtggattttgaaaaaagnatcgagggctcagnaaatcaggggganactctggaactntccggggggcccgaaatcatcncatcttccncgaanggnttccattttaacttgngaaaaatngantttgannaaaaagaattnnnacggganatcnnctttgcctttaaaanntncatgggancngganggggttnttccccccnaatggccttnaaaccnttgnnaaaaaaaaatnnaaantcaaaanccaattnnanggggttgntncgggncnnaaanggccnggnnnaaaaagnngnnaaaanntnttccccccggggngaaaaaaaaaaaaaannnnccctttttnngnaagggggnaaaaaaaaaattttn

SEQ ID NO: 223 - DNA, 1192 bp, Homo Sapiens
  misc_feature (888)..(888): n is a, c, g, or t
  misc_feature (922)..(922): n is a, c, g, or t
  misc_feature (947)..(947): n is a, c, g, or t
  misc_feature (963)..(963): n is a, c, g, or t
  misc_feature (1019)..(1019): n is a, c, g, or t
  misc_feature (1023)..(1023): n is a, c, g, or t
  misc_feature (1042)..(1042): n is a, c, g, or t
  misc_feature (1057)..(1057): n is a, c, g, or t
  misc_feature (1059)..(1059): n is a, c, g, or t
  misc_feature (1074)..(1074): n is a, c, g, or t
  misc_feature (1088)..(1088): n is a, c, g, or t
  misc_feature (1090)..(1090): n is a, c, g, or t
  misc_feature (1093)..(1093): n is a, c, g, or t
  misc_feature (1095)..(1095): n is a, c, g, or t
  misc_feature (1101)..(1101): n is a, c, g, or t
  misc_feature (1103)..(1103): n is a, c, g, or t
  misc_feature (1105)..(1105): n is a, c, g, or t
  misc_feature (1109)..(1109): n is a, c, g, or t
  misc_feature (1120)..(1120): n is a, c, g, or t
  misc_feature (1124)..(1124): n is a, c, g, or t
  misc_feature (1132)..(1132): n is a, c, g, or t
  misc_feature (1141)..(1142): n is a, c, g, or t
  misc_feature (1145)..(1145): n is a, c, g, or t
  misc_feature (1148)..(1148): n is a, c, g, or t
  misc_feature (1152)..(1152): n is a, c, g, or t
  misc_feature (1168)..(1168): n is a, c, g, or t
  misc_feature (1171)..(1171): n is a, c, g, or t
  misc_feature (1183)..(1183): n is a, c, g, or t
atagagagaattactatgagaggatcgcatcaccatcaccatcacggatcctatttaggtgacactatagaatcgtcgacccacgcgtccgggcaaaaagcaattgcagaagttgatgtgggtacagataaggcccagaattctgacccgatacttgatacttcatcactagttcctggatgttcctctgtagataacatcaagtcatctcaaacctcacaaaaccagggacttggacgtcctactcttgaaggtgatgaagagacttcagaggttgagtacacagtgaataagggcccagcttccagcaatagagacagggtaccaccttcatctgaagctagtgagcatcacccgcggcatcgtgtttcaagtcaagcggaagatacttccagcagctttgacaacctgtttattgacaggttacagaggatcaccattgcggaccaaggtgaacaacagtcagaagaaaacgcaagtactaagaacttgacaggcctttccagtgggactgagaagaaacctcattacatggaagtgctagaaatgcgagccaaaaacccagtgccccagctgcgtaaatttaaaaccaatgtgttaccttttcgacaaaatgattcatctagtcattgccagaagagtgggtctcctatttcctcagaagagcggcggcgcagggataagcagcatcttgatgacatcacagcagctcggcttctaccacttcaccatatgcccacgcagctgctctccatagaagaatccttggcacttcagaaacagcagaaacagaattatgaggagatgcaagcaaagctcgcagcgcaaaaattagctgaaagactgaatattaaaatgcggagttataatccagaaggggagtcttcngggagataccgagaagtaagggatgaagatgacnattggtcctctgatgaattctgaanataatctcctaaatcnctgacgttgaaatgtcatcatcttacatcaaactttctaactagtatcagatcagngtcnaaattgttgagggaagtantttataaagttaccnanggtagtttaaaaaanccccatttgtcttncnaangngacttncngngctngaaaggttaantttngaaattgngtttacccnnggnatnaaantttgcaaaaattgggnatnggccggaatttnaaaaaaaaa

SEQ ID NO: 224 - DNA, 1200 bp, Homo Sapiens
  misc_feature (69)..(69): n is a, c, g, or t
  misc_feature (847)..(847): n is a, c, g, or t
  misc_feature (898)..(898): n is a, c, g, or t
  misc_feature (903)..(903): n is a, c, g, or t
  misc_feature (910)..(910): n is a, c, g, or t
  misc_feature (934)..(934): n is a, c, g, or t
  misc_feature (939)..(939): n is a, c, g, or t
  misc_feature (945)..(945): n is a, c, g, or t
  misc_feature (955)..(955): n is a, c, g, or t
  misc_feature (968)..(968): n is a, c, g, or t
  misc_feature (973)..(973): n is a, c, g, or t
  misc_feature (979)..(979): n is a, c, g, or t
  misc_feature (989)..(989): n is a, c, g, or t
  misc_feature (999)..(999): n is a, c, g, or t
  misc_feature (1004)..(1004): n is a, c, g, or t
  misc_feature (1006)..(1006): n is a, c, g, or t
  misc_feature (1019)..(1020): n is a, c, g, or t
  misc_feature (1023)..(1023): n is a, c, g, or t
  misc_feature (1026)..(1026): n is a, c, g, or t
  misc_feature (1028)..(1028): n is a, c, g, or t
  misc_feature (1030)..(1030): n is a, c, g, or t
  misc_feature (1051)..(1051): n is a, c, g, or t
  misc_feature (1059)..(1059): n is a, c, g, or t
  misc_feature (1065)..(1065): n is a, c, g, or t
  misc_feature (1068)..(1069): n is a, c, g, or t
  misc_feature (1071)..(1071): n is a, c, g, or t
  misc_feature (1073)..(1074): n is a, c, g, or t
  misc_feature (1076)..(1076): n is a, c, g, or t
  misc_feature (1084)..(1084): n is a, c, g, or t
  misc_feature (1090)..(1090): n is a, c, g, or t
  misc_feature (1099)..(1099): n is a, c, g, or t
  misc_feature (1101)..(1101): n is a, c, g, or t
  misc_feature (1105)..(1105): n is a, c, g, or t
  misc_feature (1119)..(1119): n is a, c, g, or t
  misc_feature (1128)..(1128): n is a, c, g, or t
  misc_feature (1131)..(1132): n is a, c, g, or t
  misc_feature (1138)..(1138): n is a, c, g, or t
  misc_feature (1143)..(1143): n is a, c, g, or t
  misc_feature (1146)..(1146): n is a, c, g, or t
  misc_feature (1150)..(1150): n is a, c, g, or t
  misc_feature (1152)..(1155): n is a, c, g, or t
  misc_feature (1159)..(1159): n is a, c, g, or t
  misc_feature (1163)..(1164): n is a, c, g, or t
  misc_feature (1167)..(1167): n is a, c, g, or t
  misc_feature (1172)..(1173): n is a, c, g, or t
  misc_feature (1179)..(1179): n is a, c, g, or t
  misc_feature (1188)..(1188): n is a, c, g, or t
  misc_feature (1190)..(1190): n is a, c, g, or t
  misc_feature (1193)..(1193): n is a, c, g, or t
  misc_feature (1196)..(1196): n is a, c, g, or t
  misc_feature (1200)..(1200): n is a, c, g, or t
ttagagaaattactatgagaggatcgcatcaccatcaccatcacggatcctatttaggtgacactatantaatcgtcgacccacgcgtccggcccgagcggagcgccgcacgttcccaaccgcgaggccagacatctgactgttggtgtgagaccagtgctcctggtggtgtgccctgagccatggaggcgcctttgcagacagagatggtggagctggtgcccaatggcaaacactcagaggggctgctcccggtcatcacccccatggcaggcaaccagagggtcgaggaccctgcacggagctgtatggagggcaagagcttcctacagaaaagtcccagcaaggagccacacttcactgacttcgaggggaagacatcattcgggatgtcagtgttcaacctcagcaatgccatcatgggcagcggcatcctgggactcgcctatgccatggccaatacgggcattatccttttcctgttcctgttgacagctgtcgccttgctctccagctactccatccacctgctactcaagtcctcaggggtcgtgggcatccgtgcctatgagcagctgggctaccgtgcctttgggaccccaggaaagctggcagcagccctggccatcacgctccagaacatcggagccatgtccagctacctgtacatcatcaagtctgagctgccacttgtcatacagaccttcctgaacctggaggagaaaacctcggactggtacatgaacgggaactacctggtaatccttgtctctgtcaccatcattctgcccctggcactgatgcggcagcttggctacctgggctactccagcggcttctctcttanctgcatggtgttcttcctaattgcagtcatctacaaaaaagttccacgtgncctgnccactgncccccaacttcaaaaacaccacanggaantttcancccacgtggnaaatcgtgaaagnaaaangtgcanctgcaggtcnagcctgaggnttcancnttttgcatcccanntanttnangntcaattcaaaaaagcataacnatcccatnatggcnttnncntnntntgcacccnaggggngcccatttnantgantcaaggaccccccnaaaaaaaanggnnaaattnccaancgnccancnnnncagnaaannagnaattnngggggnccctttggnanctnacntttn

SEQ ID NO: 225 - DNA, 1200 bp, Homo Sapiens
  misc_feature (920)..(920): n is a, c, g, or t
  misc_feature (922)..(922): n is a, c, g, or t
  misc_feature (940)..(940): n is a, c, g, or t
  misc_feature (960)..(960): n is a, c, g, or t
  misc_feature (970)..(970): n is a, c, g, or t
  misc_feature (972)..(972): n is a, c, g, or t
  misc_feature (976)..(976): n is a, c, g, or t
  misc_feature (982)..(982): n is a, c, g, or t
  misc_feature (986)..(986): n is a, c, g, or t
  misc_feature (993)..(993): n is a, c, g, or t
  misc_feature (999)..(999): n is a, c, g, or t
  misc_feature (1001)..(1001): n is a, c, g, or t
  misc_feature (1005)..(1005): n is a, c, g, or t
  misc_feature (1007)..(1007): n is a, c, g, or t
  misc_feature (1011)..(1011): n is a, c, g, or t
  misc_feature (1020)..(1020): n is a, c, g, or t
  misc_feature (1061)..(1061): n is a, c, g, or t
  misc_feature (1087)..(1087): n is a, c, g, or t
  misc_feature (1108)..(1108): n is a, c, g, or t
  misc_feature (1114)..(1114): n is a, c, g, or t
  misc_feature (1119)..(1119): n is a, c, g, or t
  misc_feature (1124)..(1124): n is a, c, g, or t
  misc_feature (1132)..(1132): n is a, c, g, or t
  misc_feature (1135)..(1135): n is a, c, g, or t
  misc_feature (1141)..(1141): n is a, c, g, or t
  misc_feature (1145)..(1145): n is a, c, g, or t
  misc_feature (1148)..(1148): n is a, c, g, or t
  misc_feature (1157)..(1157): n is a, c, g, or t
  misc_feature (1160)..(1160): n is a, c, g, or t
  misc_feature (1162)..(1162): n is a, c, g, or t
  misc_feature (1165)..(1165): n is a, c, g, or t
  misc_feature (1168)..(1168): n is a, c, g, or t
  misc_feature (1186)..(1186): n is a, c, g, or t
  misc_feature (1189)..(1189): n is a, c, g, or t
  misc_feature (1192)..(1192): n is a, c, g, or t
  misc_feature (1194)..(1197): n is a, c, g, or t
agaaattactatgagaggatcgcatcaccatcaccatcacggatcctatttaggtgacactatagaatcgtcgacccacgcgtccgccgactacgaccccagccagccgaggaagaaaaagcgcgaggcccccttgacgggcaagaagaagcgcaagtcgcccttcgccgcggccgtggggcaggagaagcccgtgttcgaacccggggacaagacgttcgaggagtacctggatgagtattaccggctggactacgaggacatcatcgacgacctgccctgtcgcttcaagtaccgcacagtggtgccctgtgactttggcctcagcactgaggagatcctcgctgctgacgataaggagctgaaccggtggtgctccctaaagaagacctgcatgtacaggtcagagcaggaggagctgcgggacaagcgggcgtacagccagaaggcccagaactcatggaaaaagcggcaggtcttcaagtcactctgccgagaagaggcagagacacctgcggaagccacagggaagccacagagagatgaagccggcccacagaggcagctgccagcccttgatggcagcttgatggggccggagagtcccccagcacaggaagaggaagcccctgtatcaccccacaagaagccagccccccagaagcggaggagggccaagaaggcacggctgctgggccccactgtgatgcttggtggatgcgagttcagccgccagagactgcaggcctttggcctcaaccccaaacggctgcacttccgccagctgggccggcagcggaggaaacaacaggggcccaagaacagctcctgagcaccagggagcaggcaggggcctcaggctcctctcctcaatcaagccctggacagggtctcgcacccacaagtactatctgctgcananatcctctcatctgtggcnaggcacgcctgtattcccancactttggangncgangtgaangatnccttgancccagnanttgnanacancgtgggcanttacgagactcctctctacaaatgggggaccatgcctgtantcccactactcaggagctggggaagnaaatccttaaggcctgatttnaggctnaaaanctttnattgcccnttnccttcncctnggnaaaaaaaanacntnttnttnaaaaaaaaaaaaaatttnaanccngnnnntgg

SEQ ID NO: 226 - DNA, 1380 bp, Homo Sapiens
  misc_feature (4)..(4): n is a, c, g, or t
  misc_feature (235)..(235): n is a, c, g, or t
  misc_feature (408)..(408): n is a, c, g, or t
  misc_feature (434)..(434): n is a, c, g, or t
  misc_feature (449)..(449): n is a, c, g, or t
  misc_feature (462)..(462): n is a, c, g, or t
  misc_feature (465)..(465): n is a, c, g, or t
  misc_feature (475)..(475): n is a, c, g, or t
  misc_feature (482)..(482): n is a, c, g, or t
  misc_feature (496)..(496): n is a, c, g, or t
  misc_feature (536)..(536): n is a, c, g, or t
  misc_feature (546)..(546): n is a, c, g, or t
  misc_feature (561)..(561): n is a, c, g, or t
  misc_feature (565)..(565): n is a, c, g, or t
  misc_feature (567)..(567): n is a, c, g, or t
  misc_feature (579)..(579): n is a, c, g, or t
  misc_feature (584)..(584): n is a, c, g, or t
  misc_feature (588)..(588): n is a, c, g, or t
  misc_feature (603)..(604): n is a, c, g, or t
  misc_feature (610)..(610): n is a, c, g, or t
  misc_feature (622)..(622): n is a, c, g, or t
  misc_feature (625)..(625): n is a, c, g, or t
  misc_feature (631)..(631): n is a, c, g, or t
  misc_feature (636)..(636): n is a, c, g, or t
  misc_feature (655)..(655): n is a, c, g, or t
  misc_feature (660)..(661): n is a, c, g, or t
  misc_feature (667)..(667): n is a, c, g, or t
  misc_feature (669)..(669): n is a, c, g, or t
  misc_feature (676)..(676): n is a, c, g, or t
  misc_feature (680)..(680): n is a, c, g, or t
  misc_feature (688)..(688): n is a, c, g, or t
  misc_feature (704)..(704): n is a, c, g, or t
  misc_feature (706)..(708): n is a, c, g, or t
  misc_feature (716)..(717): n is a, c, g, or t
  misc_feature (720)..(721): n is a, c, g, or t
  misc_feature (724)..(724): n is a, c, g, or t
  misc_feature (726)..(726): n is a, c, g, or t
  misc_feature (729)..(731): n is a, c, g, or t
  misc_feature (745)..(746): n is a, c, g, or t
  misc_feature (749)..(749): n is a, c, g, or t
  misc_feature (756)..(756): n is a, c, g, or t
  misc_feature (760)..(761): n is a, c, g, or t
  misc_feature (766)..(767): n is a, c, g, or t
  misc_feature (771)..(771): n is a, c, g, or t
  misc_feature (775)..(775): n is a, c, g, or t
  misc_feature (777)..(777): n is a, c, g, or t
  misc_feature (787)..(787): n is a, c, g, or t
  misc_feature (793)..(793): n is a, c, g, or t
  misc_feature (798)..(799): n is a, c, g, or t
  misc_feature (802)..(802): n is a, c, g, or t
  misc_feature (818)..(818): n is a, c, g, or t
  misc_feature (824)..(825): n is a, c, g, or t
  misc_feature (829)..(829): n is a, c, g, or t
  misc_feature (834)..(834): n is a, c, g, or t
  misc_feature (838)..(838): n is a, c, g, or t
  misc_feature (843)..(843): n is a, c, g, or t
  misc_feature (849)..(849): n is a, c, g, or t
  misc_feature (853)..(853): n is a, c, g, or t
  misc_feature (860)..(860): n is a, c, g, or t
  misc_feature (862)..(862): n is a, c, g, or t
  misc_feature (870)..(870): n is a, c, g, or t
  misc_feature (876)..(877): n is a, c, g, or t
  misc_feature (883)..(883): n is a, c, g, or t
  misc_feature (889)..(889): n is a, c, g, or t
  misc_feature (891)..(891): n is a, c, g, or t
  misc_feature (902)..(902): n is a, c, g, or t
  misc_feature (904)..(909): n is a, c, g, or t
  misc_feature (911)..(911): n is a, c, g, or t
  misc_feature (921)..(921): n is a, c, g, or t
  misc_feature (931)..(931): n is a, c, g, or t
  misc_feature (937)..(937): n is a, c, g, or t
  misc_feature (939)..(940): n is a, c, g, or t
  misc_feature (947)..(947): n is a, c, g, or t
  misc_feature (950)..(950): n is a, c, g, or t
  misc_feature (953)..(953): n is a, c, g, or t
  misc_feature (958)..(958): n is a, c, g, or t
  misc_feature (967)..(967): n is a, c, g, or t
  misc_feature (974)..(974): n is a, c, g, or t
  misc_feature (978)..(978): n is a, c, g, or t
  misc_feature (981)..(981): n is a, c, g, or t
  misc_feature (984)..(984): n is a, c, g, or t
  misc_feature (993)..(993): n is a, c, g, or t
  misc_feature (1000)..(1001): n is a, c, g, or t
  misc_feature (1009)..(1011): n is a, c, g, or t
  misc_feature (1014)..(1015): n is a, c, g, or t
  misc_feature (1017)..(1017): n is a, c, g, or t
  misc_feature (1022)..(1022): n is a, c, g, or t
  misc_feature (1026)..(1026): n is a, c, g, or t
  misc_feature (1029)..(1029): n is a, c, g, or t
  misc_feature (1031)..(1031): n is a, c, g, or t
  misc_feature (1038)..(1040): n is a, c, g, or t
  misc_feature (1042)..(1043): n is a, c, g, or t
  misc_feature (1046)..(1047): n is a, c, g, or t
  misc_feature (1051)..(1051): n is a, c, g, or t
  misc_feature (1056)..(1056): n is a, c, g, or t
  misc_feature (1063)..(1066): n is a, c, g, or t
  misc_feature (1068)..(1069): n is a, c, g, or t
  misc_feature (1071)..(1071): n is a, c, g, or t
  misc_feature (1073)..(1076): n is a, c, g, or t
  misc_feature (1079)..(1079): n is a, c, g, or t
  misc_feature (1084)..(1084): n is a, c, g, or t
  misc_feature (1093)..(1093): n is a, c, g, or t
  misc_feature (1099)..(1102): n is a, c, g, or t
  misc_feature (1105)..(1105): n is a, c, g, or t
  misc_feature (1108)..(1109): n is a, c, g, or t
  misc_feature (1111)..(1111): n is a, c, g, or t
  misc_feature (1115)..(1117): n is a, c, g, or t
  misc_feature (1124)..(1128): n is a, c, g, or t
  misc_feature (1132)..(1133): n is a, c, g, or t
  misc_feature (1137)..(1137): n is a, c, g, or t
  misc_feature (1148)..(1153): n is a, c, g, or t
  misc_feature (1157)..(1157): n is a, c, g, or t
  misc_feature (1161)..(1161): n is a, c, g, or t
  misc_feature (1165)..(1166): n is a, c, g, or t
  misc_feature (1172)..(1172): n is a, c, g, or t
  misc_feature (1175)..(1175): n is a, c, g, or t
  misc_feature (1186)..(1186): n is a, c, g, or t
  misc_feature (1190)..(1192): n is a, c, g, or t
  misc_feature (1194)..(1195): n is a, c, g, or t
  misc_feature (1204)..(1204): n is a, c, g, or t
  misc_feature (1207)..(1207): n is a, c, g, or t
  misc_feature (1216)..(1216): n is a, c, g, or t
  misc_feature (1224)..(1225): n is a, c, g, or t
  misc_feature (1227)..(1228): n is a, c, g, or t
  misc_feature (1232)..(1232): n is a, c, g, or t
  misc_feature (1241)..(1241): n is a, c, g, or t
  misc_feature (1243)..(1243): n is a, c, g, or t
  misc_feature (1254)..(1255): n is a, c, g, or t
  misc_feature (1258)..(1258): n is a, c, g, or t
  misc_feature (1260)..(1262): n is a, c, g, or t
  misc_feature (1264)..(1264): n is a, c, g, or t
  misc_feature (1270)..(1271): n is a, c, g, or t
  misc_feature (1274)..(1275): n is a, c, g, or t
  misc_feature (1278)..(1279): n is a, c, g, or t
  misc_feature (1286)..(1288): n is a, c, g, or t
  misc_feature (1290)..(1291): n is a, c, g, or t
  misc_feature (1301)..(1301): n is a, c, g, or t
  misc_feature (1303)..(1303): n is a, c, g, or t
  misc_feature (1305)..(1305): n is a, c, g, or t
  misc_feature (1307)..(1311): n is a, c, g, or t
  misc_feature (1318)..(1325): n is a, c, g, or t
  misc_feature (1328)..(1328): n is a, c, g, or t
  misc_feature (1330)..(1332): n is a, c, g, or t
  misc_feature (1335)..(1335): n is a, c, g, or t
  misc_feature (1337)..(1337): n is a, c, g, or t
  misc_feature (1340)..(1340): n is a, c, g, or t
  misc_feature (1344)..(1344): n is a, c, g, or t
  misc_feature (1346)..(1347): n is a, c, g, or t
  misc_feature (1350)..(1350): n is a, c, g, or t
  misc_feature (1352)..(1353): n is a, c, g, or t
  misc_feature (1358)..(1361): n is a, c, g, or t
  misc_feature (1366)..(1371): n is a, c, g, or t
  misc_feature (1377)..(1377): n is a, c, g, or t
aaantagagaaattactatgagaggatcgcatcaccatcaccaatcacggatcctatttaggtgacactatagaatcgtcgacccacgcgtccggtccgatcttccaggatctcggccggccacagccaagcatcgcagtccccaccggccgttacctgtccgtggcggcgcacggccgaggccctcacctgtgcgggcgcctctctgtggctccctctcctccgggcggtgganatctgggccccaaggctctaccgcgcgctccatcgccggcacgccgccctgagcaaggggacagacagcatcccgcggtcacgcagccatgtgtggcccgcggcgccctgccgctgccctctgccggccagcgcgggcaccgggcggcgtctggtcccaagtacgggcgcggntcccggtgccccctgcccgcgccgcnggccgcccctgcacntgctgctcctccnagngcgcaaccgncgctctnaccttgccggcagnctccggctccgccaccccggcgccctccggaactcctcancggggtgtangcgcccgagcacgcnagcngntccgggatgcangctcngcgncaagccgggagcggnntcgganccaggcgtcccnggngcagcnactgngggtggaaacggtaagcgnaaacnnggaganancaagganacgntctaagancttgaaggatctgcgnannntgtgtaanntcnnccncntcnnncaataactctgtgnnacngcatgcngcanntttgnngccnaagngntaatctaaancaaaantcggnnggnctgaaattctgtggtnttaaanngtgngcctncttnggatncaactnagangtttgangnccaaaaantctttnnaaattntggtgnanttttttccaancnnnnnnanttaaccttcnaggtaagaancaaaancnnaaacaantcnaanctggnaaaaaaaanaataaanaaanatntcnaaaaatggnaccttannaaaaaggnnnatnngnaaaanaacnaangnaaaaaannngnnagnnaaanaaccnaaaagannnntnnangnnnntcnaaaantataaaaanaaaaannnnttnatnnanaaannnaaaaacnnnnntaannatgnaaaaaaattannnnnnattnaaanaaannaataanaanaaatataaatntaannnannaaaagattnttnaaaaataantttaattnngnnatanaaaaaaaantnaaaaaattcannaanannnantttaanntannaannaaaaatnnntnnaaatatatanananannnnnaaaaaannnnnnnnaanannnaanantanaaantnnatnanntaaannnnaatannnnnnaaaaanaaa

SEQ ID NO: 227 - DNA, 1515 bp, Homo Sapiens
  misc_feature (651)..(651): n is a, c, g, or t
  misc_feature (664)..(664): n is a, c, g, or t
  misc_feature (705)..(705): n is a, c, g, or t
  misc_feature (711)..(711): n is a, c, g, or t
  misc_feature (715)..(715): n is a, c, g, or t
  misc_feature (755)..(755): n is a, c, g, or t
  misc_feature (783)..(783): n is a, c, g, or t
  misc_feature (793)..(793): n is a, c, g, or t
  misc_feature (803)..(803): n is a, c, g, or t
  misc_feature (816)..(816): n is a, c, g, or t
  misc_feature (828)..(828): n is a, c, g, or t
  misc_feature (836)..(836): n is a, c, g, or t
  misc_feature (838)..(838): n is a, c, g, or t
  misc_feature (842)..(842): n is a, c, g, or t
  misc_feature (846)..(846): n is a, c, g, or t
  misc_feature (851)..(851): n is a, c, g, or t
  misc_feature (854)..(854): n is a, c, g, or t
  misc_feature (860)..(860): n is a, c, g, or t
  misc_feature (864)..(864): n is a, c, g, or t
  misc_feature (866)..(866): n is a, c, g, or t
  misc_feature (871)..(871): n is a, c, g, or t
  misc_feature (876)..(876): n is a, c, g, or t
  misc_feature (878)..(878): n is a, c, g, or t
  misc_feature (887)..(887): n is a, c, g, or t
  misc_feature (891)..(891): n is a, c, g, or t
  misc_feature (893)..(893): n is a, c, g, or t
  misc_feature (897)..(899): n is a, c, g, or t
  misc_feature (905)..(905): n is a, c, g, or t
  misc_feature (909)..(909): n is a, c, g, or t
  misc_feature (914)..(914): n is a, c, g, or t
  misc_feature (919)..(919): n is a, c, g, or t
  misc_feature (930)..(930): n is a, c, g, or t
  misc_feature (943)..(943): n is a, c, g, or t
  misc_feature (952)..(952): n is a, c, g, or t
  misc_feature (954)..(954): n is a, c, g, or t
  misc_feature (957)..(957): n is a, c, g, or t
  misc_feature (959)..(959): n is a, c, g, or t
  misc_feature (961)..(961): n is a, c, g, or t
  misc_feature (988)..(989): n is a, c, g, or t
  misc_feature (991)..(991): n is a, c, g, or t
  misc_feature (1004)..(1004): n is a, c, g, or t
  misc_feature (1006)..(1006): n is a, c, g, or t
  misc_feature (1012)..(1014): n is a, c, g, or t
  misc_feature (1017)..(1017): n is a, c, g, or t
  misc_feature (1028)..(1030): n is a, c, g, or t
  misc_feature (1036)..(1036): n is a, c, g, or t
  misc_feature (1042)..(1042): n is a, c, g, or t
  misc_feature (1054)..(1054): n is a, c, g, or t
  misc_feature (1056)..(1056): n is a, c, g, or t
  misc_feature (1060)..(1060): n is a, c, g, or t
  misc_feature (1066)..(1066): n is a, c, g, or t
  misc_feature (1068)..(1068): n is a, c, g, or t
  misc_feature (1074)..(1074): n is a, c, g, or t
  misc_feature (1093)..(1093): n is a, c, g, or t
  misc_feature (1098)..(1098): n is a, c, g, or t
  misc_feature (1103)..(1103): n is a, c, g, or t
  misc_feature (1108)..(1109): n is a, c, g, or t
  misc_feature (1114)..(1114): n is a, c, g, or t
  misc_feature (1118)..(1118): n is a, c, g, or t
  misc_feature (1121)..(1121): n is a, c, g, or t
  misc_feature (1130)..(1130): n is a, c, g, or t
  misc_feature (1134)..(1134): n is a, c, g, or t
  misc_feature (1139)..(1139): n is a, c, g, or t
  misc_feature (1142)..(1143): n is a, c, g, or t
  misc_feature (1145)..(1145): n is a, c, g, or t
  misc_feature (1148)..(1149): n is a, c, g, or t
  misc_feature (1153)..(1153): n is a, c, g, or t
  misc_feature (1157)..(1157): n is a, c, g, or t
  misc_feature (1161)..(1162): n is a, c, g, or t
  misc_feature (1164)..(1164): n is a, c, g, or t
  misc_feature (1166)..(1167): n is a, c, g, or t
  misc_feature (1175)..(1175): n is a, c, g, or t
  misc_feature (1178)..(1178): n is a, c, g, or t
  misc_feature (1191)..(1191): n is a, c, g, or t
  misc_feature (1193)..(1193): n is a, c, g, or t
  misc_feature (1197)..(1198): n is a, c, g, or t
  misc_feature (1201)..(1201): n is a, c, g, or t
  misc_feature (1203)..(1203): n is a, c, g, or t
  misc_feature (1214)..(1215): n is a, c, g, or t
  misc_feature (1220)..(1220): n is a, c, g, or t
  misc_feature (1224)..(1225): n is a, c, g, or t
  misc_feature (1227)..(1227): n is a, c, g, or t
  misc_feature (1229)..(1229): n is a, c, g, or t
  misc_feature (1231)..(1231): n is a, c, g, or t
  misc_feature (1242)..(1242): n is a, c, g, or t
  misc_feature (1245)..(1245): n is a, c, g, or t
  misc_feature (1247)..(1248): n is a, c, g, or t
  misc_feature (1255)..(1255): n is a, c, g, or t
  misc_feature (1268)..(1270): n is a, c, g, or t
  misc_feature (1272)..(1272): n is a, c, g, or t
  misc_feature (1282)..(1282): n is a, c, g, or t
  misc_feature (1284)..(1284): n is a, c, g, or t
  misc_feature (1287)..(1287): n is a, c, g, or t
  misc_feature (1290)..(1290): n is a, c, g, or t
  misc_feature (1297)..(1298): n is a, c, g, or t
  misc_feature (1304)..(1304): n is a, c, g, or t
  misc_feature (1309)..(1309): n is a, c, g, or t
  misc_feature (1315)..(1316): n is a, c, g, or t
  misc_feature (1319)..(1320): n is a, c, g, or t
  misc_feature (1324)..(1324): n is a, c, g, or t
  misc_feature (1332)..(1333): n is a, c, g, or t
  misc_feature (1339)..(1341): n is a, c, g, or t
  misc_feature (1344)..(1344): n is a, c, g, or t
  misc_feature (1346)..(1346): n is a, c, g, or t
  misc_feature (1350)..(1350): n is a, c, g, or t
  misc_feature (1355)..(1355): n is a, c, g, or t
  misc_feature (1357)..(1358): n is a, c, g, or t
  misc_feature (1362)..(1362): n is a, c, g, or t
  misc_feature (1371)..(1371): n is a, c, g, or t
  misc_feature (1380)..(1380): n is a, c, g, or t
  misc_feature (1382)..(1382): n is a, c, g, or t
  misc_feature (1386)..(1386): n is a, c, g, or t
  misc_feature (1388)..(1388): n is a, c, g, or t
  misc_feature (1390)..(1391): n is a, c, g, or t
  misc_feature (1399)..(1400): n is a, c, g, or t
  misc_feature (1419)..(1420): n is a, c, g, or t
  misc_feature (1424)..(1424): n is a, c, g, or t
  misc_feature (1426)..(1426): n is a, c, g, or t
  misc_feature (1430)..(1430): n is a, c, g, or t
  misc_feature (1433)..(1433): n is a, c, g, or t
  misc_feature (1438)..(1438): n is a, c, g, or t
  misc_feature (1448)..(1448): n is a, c, g, or t
  misc_feature (1457)..(1457): n is a, c, g, or t
  misc_feature (1461)..(1461): n is a, c, g, or t
  misc_feature (1463)..(1463): n is a, c, g, or t
  misc_feature (1468)..(1468): n is a, c, g, or t
  misc_feature (1471)..(1472): n is a, c, g, or t
  misc_feature (1475)..(1475): n is a, c, g, or t
  misc_feature (1480)..(1480): n is a, c, g, or t
  misc_feature (1488)..(1488): n is a, c, g, or t
  misc_feature (1491)..(1491): n is a, c, g, or t
  misc_feature (1494)..(1494): n is a, c, g, or t
  misc_feature (1504)..(1504): n is a, c, g, or t
  misc_feature (1506)..(1507): n is a, c, g, or t
  misc_feature (1515)..(1515): n is a, c, g, or t
atagagagaattactatgagaggatcgcatcaccatcaccatcacggatcctatttaggtgacactatagaatcgtcgacccacgcgtccgagaactgctccaccccgctggctctgcccactcgagacctcaatgccacctttgatctctctgaggagcctccctcaaagcccagtttccatgaatgcattggctgggacaaaataccccaggagctgagcaggctggaccagcccttcatccccagggcacctgtgcccctgttcaccatgaagggccccaagccaacatcttccctccctgggacctctgcctgcaagaagaagcgcgttgcgagttcctcagtctcccatggccgcagccgcatcgcccgcctccccagcagcactttgaagaggccagctgggccccttgtactcccaggtgactggcactagggacagggatagcctgggccatggaggccgatgaagacaagaaggaggaggggacggggagctgatacccaaaagaaaggagggcctagggtattgccaagcatctcagggatgctgctgatgagacaggtgggaggtgggctggaggacggggacagagcgtcactttccttcctcgctgcactccccgccacccatccaactggcctgcanagctgcccttgantcccctgtgccctagcaaccggaggaatggaaaggacctcntcaggntggngagagcactctcagcagggaacggcgtcaccaaggtgtcntgaccgccagaatgtcctgaccaccaangtgtcctaanctaaccggcncctctgctggaanaccccctcttgnaacctgtnanccancctngcacnaanaagctngaancntgtcnttccntnaccttgggnaagnanttannngccaanaccnctttngctgntattaaaattnccttccccaaaantccattccngntantncncccttcagtttaattttccttgttaanntncattttttttggnanttaaannnatnaattttgtgannngtaaanggggcngctgtcattttntntttnaaggtngnattatngattttttgttttttttgnttcanaaaanaaatnnttttnttgntcnccaattttngtantgccntgnntncanntttngtcncttnntncnncccctctnttngtttaatgaaatntntccnnccnanttttccaaaanntggantttnntngnanactttacaccncantnnattttcntcttaataaaaannngnttttcaattnantcnatntgtcttnntaactncattnaaattnntanntttntttcctanngatagnnnatnanttcnctttntnntganttttttaanagcaccttntnttcncncnnttttttannaaacaccttccctcttaannagantntttnaanttttncctctctcanacataactntctntntattnatnnatnatatnctacacantcnctnattttaattnanngatctgan

SEQ ID NO: 228 - DNA, 1309 bp, Homo Sapiens
  misc_feature (1)..(1): n is a, c, g, or t
  misc_feature (608)..(608): n is a, c, g, or t
  misc_feature (633)..(635): n is a, c, g, or t
  misc_feature (637)..(637): n is a, c, g, or t
  misc_feature (639)..(645): n is a, c, g, or t
  misc_feature (649)..(653): n is a, c, g, or t
  misc_feature (655)..(659): n is a, c, g, or t
  misc_feature (661)..(707): n is a, c, g, or t
  misc_feature (709)..(713): n is a, c, g, or t
  misc_feature (715)..(715): n is a, c, g, or t
  misc_feature (717)..(717): n is a, c, g, or t
  misc_feature (720)..(734): n is a, c, g, or t
  misc_feature (737)..(740): n is a, c, g, or t
  misc_feature (742)..(742): n is a, c, g, or t
  misc_feature (744)..(744): n is a, c, g, or t
  misc_feature (747)..(751): n is a, c, g, or t
  misc_feature (753)..(754): n is a, c, g, or t
  misc_feature (756)..(756): n is a, c, g, or t
  misc_feature (758)..(758): n is a, c, g, or t
  misc_feature (760)..(761): n is a, c, g, or t
  misc_feature (763)..(763): n is a, c, g, or t
  misc_feature (768)..(768): n is a, c, g, or t
  misc_feature (772)..(773): n is a, c, g, or t
  misc_feature (775)..(778): n is a, c, g, or t
  misc_feature (782)..(788): n is a, c, g, or t
  misc_feature (794)..(794): n is a, c, g, or t
  misc_feature (797)..(800): n is a, c, g, or t
  misc_feature (802)..(803): n is a, c, g, or t
  misc_feature (807)..(807): n is a, c, g, or t
  misc_feature (809)..(810): n is a, c, g, or t
  misc_feature (815)..(821): n is a, c, g, or t
  misc_feature (824)..(824): n is a, c, g, or t
  misc_feature (827)..(827): n is a, c, g, or t
  misc_feature (829)..(830): n is a, c, g, or t
  misc_feature (832)..(834): n is a, c, g, or t
  misc_feature (843)..(843): n is a, c, g, or t
  misc_feature (845)..(847): n is a, c, g, or t
  misc_feature (851)..(852): n is a, c, g, or t
  misc_feature (854)..(861): n is a, c, g, or t
  misc_feature (865)..(867): n is a, c, g, or t
  misc_feature (870)..(870): n is a, c, g, or t
  misc_feature (875)..(888): n is a, c, g, or t
  misc_feature (891)..(898): n is a, c, g, or t
  misc_feature (907)..(910): n is a, c, g, or t
  misc_feature (912)..(916): n is a, c, g, or t
  misc_feature (919)..(923): n is a, c, g, or t
  misc_feature (926)..(926): n is a, c, g, or t
  misc_feature (928)..(929): n is a, c, g, or t
  misc_feature (932)..(932): n is a, c, g, or t
  misc_feature (934)..(937): n is a, c, g, or t
  misc_feature (939)..(941): n is a, c, g, or t
  misc_feature (943)..(945): n is a, c, g, or t
  misc_feature (952)..(952): n is a, c, g, or t
  misc_feature (957)..(962): n is a, c, g, or t
  misc_feature (965)..(971): n is a, c, g, or t
  misc_feature (973)..(978): n is a, c, g, or t
  misc_feature (980)..(992): n is a, c, g, or t
  misc_feature (994)..(996): n is a, c, g, or t
  misc_feature (999)..(1005): n is a, c, g, or t
  misc_feature (1007)..(1007): n is a, c, g, or t
  misc_feature (1010)..(1014): n is a, c, g, or t
  misc_feature (1021)..(1029): n is a, c, g, or t
  misc_feature (1031)..(1031): n is a, c, g, or t
  misc_feature (1034)..(1034): n is a, c, g, or t
  misc_feature (1036)..(1043): n is a, c, g, or t
  misc_feature (1046)..(1046): n is a, c, g, or t
  misc_feature (1048)..(1053): n is a, c, g, or t
  misc_feature (1057)..(1057): n is a, c, g, or t
  misc_feature (1059)..(1062): n is a, c, g, or t
  misc_feature (1066)..(1074): n is a, c, g, or t
  misc_feature (1076)..(1076): n is a, c, g, or t
  misc_feature (1079)..(1084): n is a, c, g, or t
  misc_feature (1087)..(1090): n is a, c, g, or t
  misc_feature (1093)..(1102): n is a, c, g, or t
  misc_feature (1105)..(1118): n is a, c, g, or t
  misc_feature (1120)..(1122): n is a, c, g, or t
  misc_feature (1126)..(1131): n is a, c, g, or t
  misc_feature (1133)..(1133): n is a, c, g, or t
  misc_feature (1136)..(1136): n is a, c, g, or t
  misc_feature (1138)..(1142): n is a, c, g, or t
  misc_feature (1146)..(1146): n is a, c, g, or t
  misc_feature (1148)..(1152): n is a, c, g, or t
  misc_feature (1155)..(1157): n is a, c, g, or t
  misc_feature (1160)..(1161): n is a, c, g, or t
  misc_feature (1166)..(1169): n is a, c, g, or t
  misc_feature (1171)..(1176): n is a, c, g, or t
  misc_feature (1179)..(1186): n is a, c, g, or t
  misc_feature (1188)..(1194): n is a, c, g, or t
  misc_feature (1197)..(1201): n is a, c, g, or t
  misc_feature (1203)..(1208): n is a, c, g, or t
  misc_feature (1210)..(1222): n is a, c, g, or t
  misc_feature (1226)..(1230): n is a, c, g, or t
  misc_feature (1235)..(1242): n is a, c, g, or t
  misc_feature (1244)..(1246): n is a, c, g, or t
  misc_feature (1250)..(1250): n is a, c, g, or t
  misc_feature (1256)..(1277): n is a, c, g, or t
  misc_feature (1280)..(1281): n is a, c, g, or t
  misc_feature (1283)..(1293): n is a, c, g, or t
  misc_feature (1296)..(1297): n is a, c, g, or t
  misc_feature (1299)..(1300): n is a, c, g, or t
  misc_feature (1303)..(1304): n is a, c, g, or t
  misc_feature (1307)..(1309): n is a, c, g, or t
nagagaaattactatgagaggatcgcatcaccatcaccatcacggatcctatttaggtgacactatagaatcgtcgacccacgcgtccggagggtggggggtgtgggaagggtaccacagatcaggccggggcagctgtaggggcgggggcccagacagccaggccgccaccagagcagccccatggggtgccccagacgcgggcctccaagaagccaagtcccagtctgttttctggcatcagacaccggcccgtgttccttgtcagacagacagactctcaggcctgcctggggagtcgtgtccctcagctgcagggcactgtgttgggaaaccattggctgggcctttgaggacacagatcagaagaaagaaagacaactttcctctgcgcggaacactcacacggaagggctggccgcctccctgagccggctgggagtggacgacaggacctacctccccagagcaagggcctggggcttcccgccaaagctgccgcggaaccccgctagtgcgaccaccctccctccgtcggtatgtcctgctttccagctgaacccaaactacaagtgggtttaaaaaaataaacaccaccaccaaaaacnaaaaaaaaaaaaaaaaaaaaaaaannnanannnnnnnaaannnnnannnnnannnnnnnnnnnnnnnnnnnnnnnnnnnnnnnnnnnnnnnnnnnnnnngnnnnncncnccnnnnnnnnnnnnnnnttnnnntnanttnnnnnanntngnanncnttttnaaanntnnnnaaannnnnnnaaaacnccnnnngnntttntnnaaaannnnnnnttnccncnngnnnttttttttngnnnaaanncnnnnnnnnttgnnnaanttttnnnnnnnnnnnnnnttnnnnnnnnaaaaaaatnnnngnnnnnacnnnnnttnannttncnnnngnnntnnnaaaaaanttttnnnnnnttnnnnnnntnnnnnntnnnnnnnnnnnnnannnttnnnnnnnantannnnnttttaannnnnnnnnanaanannnnnnnnttnannnnnntttntnnnntttnnnnnnnnnanaannnnnnccnnnnttnnnnnnnnnnaannnnnnnnnnnnnnannnaaannnnnncnttntnnnnntttncnnnnnaannnaannttttnnnntnnnnnnaannnnnnnntnnnnnnnttnnnnnannnnnnannnnnnnnnnnnnaaannnnnttttnnnnnnnntnnnaaantttttnnnnnnnnnnnnnnnnnnnnnnttnntnnnnnnnnnnnaanntnnccnnttnnn

SEQ ID NO: 229 - DNA, 1442 bp, Homo Sapiens
  misc_feature (786)..(786): n is a, c, g, or t
  misc_feature (789)..(789): n is a, c, g, or t
  misc_feature (822)..(822): n is a, c, g, or t
  misc_feature (874)..(875): n is a, c, g, or t
  misc_feature (891)..(891): n is a, c, g, or t
  misc_feature (898)..(898): n is a, c, g, or t
  misc_feature (925)..(925): n is a, c, g, or t
  misc_feature (927)..(928): n is a, c, g, or t
  misc_feature (934)..(934): n is a, c, g, or t
  misc_feature (948)..(948): n is a, c, g, or t
  misc_feature (954)..(954): n is a, c, g, or t
  misc_feature (963)..(963): n is a, c, g, or t
  misc_feature (992)..(992): n is a, c, g, or t
  misc_feature (994)..(994): n is a, c, g, or t
  misc_feature (1000)..(1000): n is a, c, g, or t
  misc_feature (1003)..(1004): n is a, c, g, or t
  misc_feature (1009)..(1011): n is a, c, g, or t
  misc_feature (1013)..(1014): n is a, c, g, or t
  misc_feature (1028)..(1028): n is a, c, g, or t
  misc_feature (1040)..(1040): n is a, c, g, or t
  misc_feature (1044)..(1044): n is a, c, g, or t
  misc_feature (1049)..(1052): n is a, c, g, or t
  misc_feature (1054)..(1055): n is a, c, g, or t
  misc_feature (1058)..(1058): n is a, c, g, or t
  misc_feature (1062)..(1062): n is a, c, g, or t
  misc_feature (1068)..(1068): n is a, c, g, or t
  misc_feature (1081)..(1081): n is a, c, g, or t
  misc_feature (1092)..(1092): n is a, c, g, or t
  misc_feature (1099)..(1099): n is a, c, g, or t
  misc_feature (1101)..(1101): n is a, c, g, or t
  misc_feature (1111)..(1111): n is a, c, g, or t
  misc_feature (1121)..(1121): n is a, c, g, or t
  misc_feature (1123)..(1125): n is a, c, g, or t
  misc_feature (1130)..(1131): n is a, c, g, or t
  misc_feature (1134)..(1136): n is a, c, g, or t
  misc_feature (1138)..(1140): n is a, c, g, or t
  misc_feature (1142)..(1142): n is a, c, g, or t
  misc_feature (1149)..(1149): n is a, c, g, or t
  misc_feature (1152)..(1152): n is a, c, g, or t
  misc_feature (1156)..(1156): n is a, c, g, or t
  misc_feature (1161)..(1161): n is a, c, g, or t
  misc_feature (1163)..(1164): n is a, c, g, or t
  misc_feature (1167)..(1168): n is a, c, g, or t
  misc_feature (1171)..(1171): n is a, c, g, or t
  misc_feature (1174)..(1174): n is a, c, g, or t
  misc_feature (1182)..(1182): n is a, c, g, or t
  misc_feature (1186)..(1187): n is a, c, g, or t
  misc_feature (1196)..(1196): n is a, c, g, or t
  misc_feature (1201)..(1202): n is a, c, g, or t
  misc_feature (1206)..(1206): n is a, c, g, or t
  misc_feature (1211)..(1212): n is a, c, g, or t
  misc_feature (1214)..(1214): n is a, c, g, or t
  misc_feature (1216)..(1216): n is a, c, g, or t
  misc_feature (1221)..(1221): n is a, c, g, or t
  misc_feature (1226)..(1226): n is a, c, g, or t
  misc_feature (1242)..(1242): n is a, c, g, or t
  misc_feature (1245)..(1245): n is a, c, g, or t
  misc_feature (1247)..(1248): n is a, c, g, or t
  misc_feature (1254)..(1254): n is a, c, g, or t
  misc_feature (1271)..(1271): n is a, c, g, or t
  misc_feature (1274)..(1274): n is a, c, g, or t
  misc_feature (1279)..(1279): n is a, c, g, or t
  misc_feature (1282)..(1282): n is a, c, g, or t
  misc_feature (1284)..(1284): n is a, c, g, or t
  misc_feature (1287)..(1287): n is a, c, g, or t
  misc_feature (1291)..(1293): n is a, c, g, or t
  misc_feature (1307)..(1307): n is a, c, g, or t
  misc_feature (1315)..(1315): n is a, c, g, or t
  misc_feature (1317)..(1317): n is a, c, g, or t
  misc_feature (1323)..(1323): n is a, c, g, or t
  misc_feature (1329)..(1329): n is a, c, g, or t
  misc_feature (1331)..(1331): n is a, c, g, or t
  misc_feature (1333)..(1333): n is a, c, g, or t
  misc_feature (1343)..(1343): n is a, c, g, or t
  misc_feature (1347)..(1347): n is a, c, g, or t
  misc_feature (1353)..(1354): n is a, c, g, or t
  misc_feature (1356)..(1356): n is a, c, g, or t
  misc_feature (1358)..(1358): n is a, c, g, or t
  misc_feature (1365)..(1366): n is a, c, g, or t
  misc_feature (1371)..(1371): n is a, c, g, or t
  misc_feature (1378)..(1379): n is a, c, g, or t
  misc_feature (1381)..(1382): n is a, c, g, or t
  misc_feature (1385)..(1385): n is a, c, g, or t
  misc_feature (1390)..(1390): n is a, c, g, or t
  misc_feature (1393)..(1393): n is a, c, g, or t
  misc_feature (1395)..(1395): n is a, c, g, or t
  misc_feature (1401)..(1404): n is a, c, g, or t
  misc_feature (1407)..(1407): n is a, c, g, or t
  misc_feature (1410)..(1411): n is a, c, g, or t
  misc_feature (1416)..(1416): n is a, c, g, or t
  misc_feature (1425)..(1427): n is a, c, g, or t
  misc_feature (1430)..(1430): n is a, c, g, or t
  misc_feature (1441)..(1441): n is a, c, g, or t
tagagaaattactatgagaggatcgcatcaccatcaccatcacggatcctatttaggtgacactatagaatcgtcgacccacgcgtccgtgaattggtgcgtcatttccgacatggaagtcatcgagctgaacaaatgcacctcgggccaatcctttgaagtcatcctgaagccaccctcctttgatggggttcccgagttcaacgcctccctgccaaggcggcgagacccatccctggaagagatccagaagaaactagaagcggctgaggagcgaaggaagtaccaggaagcggagctcctgaaacacctagcagagaaacgggaacatgagagagaggtgatccaaaaggccattgaggaaaacaacaacttcatcaagatggctaaggaaaaactggcccagaagatggaatccaacaaggagaacagggaggcccacctcgccgccatgttggaacggctgcaagagaaggacaagcacgccgaggaggtgcggaaaaacaaggagctgaaggaagaggcctccaggtaaagcctagaggccaaagaactttccaggtcagccggacagctccagcagctccacgttccaggcagcctcgcccgccggctgcgctcccagcactggggtttggggggaggggggtggccaaggggcgtttcctctgcttttggtgtttgtacatgttaagaattgaccagtgaagccatcctatttgtttccggggaacaatgacggggtgggagaggggagaggaaagagtttgggaaaaggagatgganaanaactcaaggacattgcaaccctgcccggcgcanatctgattttcacatctctacctggacattgaaccctccaggcaccatgttnnaggaagagatgaaaanccagggncggttaaaacttccgggttgaaagganannagttcntgggttggggcaancggctncaggggccncacccaaataaccccactccagaaggggngntgaatnccnntgggnnntnncttccccccctgcnacaggggggaanaagncctgnnnngnntgntttnaaccanctttttttgattntcctgctcaantggaacntntggccaaaanaaaaaaaatntnnnatatnnttnnnannntntccgggncgncccnccctnannggnnccnaanagctttanttanntgaacttgnacccnngggntaaanncnanagccncccancccctctggttttttnaangnncggttngccccgggggttttttntgngaaanccncnttntttnnntttttcgcattggnactctctngnaaaaanacgtgntntnccccctgatnattncccggnntntnaaaaaannttggnttttctnntnnccngctcnaanangctttnnnnttngtnntttangaaaaaaannnctnttccttttttnt

SEQ ID NO: 230 - DNA, 1197 bp, Homo Sapiens
  misc_feature (1)..(1): n is a, c, g, or t
  misc_feature (3)..(3): n is a, c, g, or t
  misc_feature (844)..(844): n is a, c, g, or t
  misc_feature (875)..(875): n is a, c, g, or t
  misc_feature (892)..(892): n is a, c, g, or t
  misc_feature (934)..(934): n is a, c, g, or t
  misc_feature (942)..(942): n is a, c, g, or t
  misc_feature (945)..(945): n is a, c, g, or t
  misc_feature (965)..(965): n is a, c, g, or t
  misc_feature (984)..(984): n is a, c, g, or t
  misc_feature (995)..(995): n is a, c, g, or t
  misc_feature (1001)..(1001): n is a, c, g, or t
  misc_feature (1007)..(1007): n is a, c, g, or t
  misc_feature (1019)..(1019): n is a, c, g, or t
  misc_feature (1033)..(1033): n is a, c, g, or t
  misc_feature (1037)..(1037): n is a, c, g, or t
  misc_feature (1041)..(1041): n is a, c, g, or t
  misc_feature (1044)..(1044): n is a, c, g, or t
  misc_feature (1049)..(1050): n is a, c, g, or t
  misc_feature (1054)..(1054): n is a, c, g, or t
  misc_feature (1062)..(1062): n is a, c, g, or t
  misc_feature (1074)..(1074): n is a, c, g, or t
  misc_feature (1077)..(1077): n is a, c, g, or t
  misc_feature (1079)..(1079): n is a, c, g, or t
  misc_feature (1082)..(1082): n is a, c, g, or t
  misc_feature (1093)..(1093): n is a, c, g, or t
  misc_feature (1117)..(1117): n is a, c, g, or t
  misc_feature (1120)..(1120): n is a, c, g, or t
  misc_feature (1123)..(1123): n is a, c, g, or t
  misc_feature (1125)..(1125): n is a, c, g, or t
  misc_feature (1138)..(1139): n is a, c, g, or t
  misc_feature (1141)..(1141): n is a, c, g, or t
  misc_feature (1145)..(1145): n is a, c, g, or t
  misc_feature (1154)..(1154): n is a, c, g, or t
  misc_feature (1157)..(1158): n is a, c, g, or t
  misc_feature (1161)..(1161): n is a, c, g, or t
  misc_feature (1168)..(1170): n is a, c, g, or t
  misc_feature (1172)..(1172): n is a, c, g, or t
  misc_feature (1174)..(1174): n is a, c, g, or t
  misc_feature (1179)..(1179): n is a, c, g, or t
  misc_feature (1183)..(1183): n is a, c, g, or t
  misc_feature (1186)..(1188): n is a, c, g, or t
  misc_feature (1192)..(1192): n is a, c, g, or t
  misc_feature (1195)..(1195): n is a, c, g, or t
nantagagaaattactatgagaggatcgcatcaccatcaccatcacggatcctatttaggtgacactatagaatcgtcgacccacgcgtccgggcgcggggctctcatagtgctggagggcgtggaccgcgccgggaagagcacgcagagccgcaagctggtggaagcgctgtgcgccgcgggccaccgcgccgaactgctccggttcccggaaagatcaactgaaatcggcaaacttctgagttcctacttgcaaaagaaaagtgacgtggaggatcactcggtgcacctgcttttttctgcaaatcgctgggaacaagtgccgttaattaaggaaaagttgagccagggcgtgaccctcgtcgtggacagatacgcattttctggtgtggccttcaccggtgccaaggagaatttttccctagactggtgtaaacagccagacgtgggccttcccaaacccgacctggtcctgttcctccagttacagctggcggatgctgccaagcggggagcgtttggccatgagcgctatgagaacggggctttccaggagcgggcgctccggtgtttccaccagctcatgaaagacacgactttgaactggaagatggtggatgcttccaaaagcatcgaagctgtccatgaggacatccgcgtgctctctgaggacgccatccgcactgccacagagaagccgctgggggagctatggaagtgacccaaggctgcccactggagacgcctctccctgcagtcccccgagaggtgggagactcgcggaaggccccgtccccagcggagtccagaccccacaacttcaggagctctttcccggcagcanagatctgcaggctgcctcttctgccccgganctggggtgcactggggnacccccgtggtggggaccttggcagtgtggacatgaacaaancgatggancantctcctgccctctcccctgncctgagggcactctgttgnattttcttacngaagtncatganaactctgaacantttcattgtgatcnctgnaaanggnaatcnnttgnaatttccnaaatgtcttccnaancntantaaaaaaaacntgaaaaaaaaaaaaaaaaaaaaanggnggncncccccaaaagganncnaatnaacttaatnacnnaanttggacnnntntnaaaantccnaannncccnaancc

SEQ ID NO: 231 - DNA, 1380 bp, Homo Sapiens
  misc_feature (2)..(2): n is a, c, g, or t
  misc_feature (801)..(801): n is a, c, g, or t
  misc_feature (807)..(807): n is a, c, g, or t
  misc_feature (818)..(818): n is a, c, g, or t
  misc_feature (826)..(826): n is a, c, g, or t
  misc_feature (851)..(852): n is a, c, g, or t
  misc_feature (868)..(868): n is a, c, g, or t
  misc_feature (872)..(872): n is a, c, g, or t
  misc_feature (886)..(886): n is a, c, g, or t
  misc_feature (896)..(896): n is a, c, g, or t
  misc_feature (899)..(899): n is a, c, g, or t
  misc_feature (903)..(903): n is a, c, g, or t
  misc_feature (905)..(905): n is a, c, g, or t
  misc_feature (923)..(923): n is a, c, g, or t
  misc_feature (927)..(927): n is a, c, g, or t
  misc_feature (938)..(939): n is a, c, g, or t
  misc_feature (954)..(954): n is a, c, g, or t
  misc_feature (968)..(968): n is a, c, g, or t
  misc_feature (974)..(974): n is a, c, g, or t
  misc_feature (978)..(978): n is a, c, g, or t
  misc_feature (982)..(984): n is a, c, g, or t
  misc_feature (986)..(986): n is a, c, g, or t
  misc_feature (991)..(992): n is a, c, g, or t
  misc_feature (995)..(995): n is a, c, g, or t
  misc_feature (1001)..(1001): n is a, c, g, or t
  misc_feature (1006)..(1006): n is a, c, g, or t
  misc_feature (1017)..(1017): n is a, c, g, or t
  misc_feature (1026)..(1026): n is a, c, g, or t
  misc_feature (1034)..(1034): n is a, c, g, or t
  misc_feature (1036)..(1036): n is a, c, g, or t
  misc_feature (1044)..(1044): n is a, c, g, or t
  misc_feature (1047)..(1048): n is a, c, g, or t
  misc_feature (1058)..(1058): n is a, c, g, or t
  misc_feature (1067)..(1067): n is a, c, g, or t
  misc_feature (1070)..(1070): n is a, c, g, or t
  misc_feature (1073)..(1073): n is a, c, g, or t
  misc_feature (1077)..(1077): n is a, c, g, or t
  misc_feature (1079)..(1080): n is a, c, g, or t
  misc_feature (1083)..(1083): n is a, c, g, or t
  misc_feature (1091)..(1091): n is a, c, g, or t
  misc_feature (1093)..(1093): n is a, c, g, or t
  misc_feature (1110)..(1110): n is a, c, g, or t
  misc_feature (1113)..(1113): n is a, c, g, or t
  misc_feature (1116)..(1116): n is a, c, g, or t
  misc_feature (1129)..(1129): n is a, c, g, or t
  misc_feature (1132)..(1136): n is a, c, g, or t
  misc_feature (1142)..(1142): n is a, c, g, or t
  misc_feature (1145)..(1146): n is a, c, g, or t
  misc_feature (1148)..(1148): n is a, c, g, or t
  misc_feature (1150)..(1151): n is a, c, g, or t
  misc_feature (1153)..(1154): n is a, c, g, or t
  misc_feature (1175)..(1175): n is a, c, g, or t
  misc_feature (1179)..(1180): n is a, c, g, or t
  misc_feature (1182)..(1182): n is a, c, g, or t
  misc_feature (1184)..(1184): n is a, c, g, or t
  misc_feature (1186)..(1186): n is a, c, g, or t
  misc_feature (1189)..(1191): n is a, c, g, or t
  misc_feature (1194)..(1195): n is a, c, g, or t
  misc_feature (1198)..(1198): n is a, c, g, or t
  misc_feature (1200)..(1202): n is a, c, g, or t
  misc_feature (1210)..(1210): n is a, c, g, or t
  misc_feature (1215)..(1215): n is a, c, g, or t
  misc_feature (1217)..(1217): n is a, c, g, or t
  misc_feature (1221)..(1222): n is a, c, g, or t
  misc_feature (1225)..(1225): n is a, c, g, or t
  misc_feature (1227)..(1227): n is a, c, g, or t
  misc_feature (1231)..(1232): n is a, c, g, or t
  misc_feature (1252)..(1252): n is a, c, g, or t
  misc_feature (1257)..(1257): n is a, c, g, or t
  misc_feature (1264)..(1264): n is a, c, g, or t
  misc_feature (1267)..(1270): n is a, c, g, or t
  misc_feature (1272)..(1273): n is a, c, g, or t
  misc_feature (1276)..(1278): n is a, c, g, or t
  misc_feature (1280)..(1288): n is a, c, g, or t
  misc_feature (1291)..(1296): n is a, c, g, or t
  misc_feature (1299)..(1301): n is a, c, g, or t
  misc_feature (1304)..(1313): n is a, c, g, or t
  misc_feature (1315)..(1315): n is a, c, g, or t
  misc_feature (1329)..(1330): n is a, c, g, or t
  misc_feature (1333)..(1333): n is a, c, g, or t
  misc_feature (1336)..(1339): n is a, c, g, or t
  misc_feature (1341)..(1342): n is a, c, g, or t
  misc_feature (1344)..(1348): n is a, c, g, or t
  misc_feature (1353)..(1355): n is a, c, g, or t
  misc_feature (1357)..(1357): n is a, c, g, or t
  misc_feature (1359)..(1360): n is a, c, g, or t
  misc_feature (1367)..(1367): n is a, c, g, or t
  misc_feature (1370)..(1370): n is a, c, g, or t
  misc_feature (1373)..(1373): n is a, c, g, or t
  misc_feature (1375)..(1375): n is a, c, g, or t
  misc_feature (1377)..(1377): n is a, c, g, or t
cnaatagagagaattactatgagaggatcgcatcaccatcaccatcacggatcctatttaggtgacactatagaatcgtcgacccacgcgtccggctacttcttcttggacgacacggaccctgatagcatgaaggattttgagatcgtggaccagccgggcttggacatctttggacaggttttcaaccagtggaagagcaaggagtgtgtttgccccaattgcagtcgcagcattgccgcctcccgctttgctccccatctggagaagtgcctgggaatgggtcggaacagcagccgaatcgccaaccgccggattgccaatagcaacaatatgaataagtctgagagtgaccaagaagataatgatgacatcaatgacaacgactggtcctatggctcggagaagaaagccaagaagagaaagtcagacaagaaccccaattcccctcgaagatccaagtcattaaaacacaaaaatggggaacttagcaattcggatccttttaagtataacaattcaactgggatcagctatgagaccctggggccggaggagcttcgcagcctgctaaccacgcaatgtggggtgatttctgaacacaccaagaagatgtgcacaaggtccctgcgctgcccacagcacacagatgagcagaggcgaaccgtacggatttattttctcgggccctcggctgtccttccagaagtcgagagctccctggataatgacagctttgacatgactgacagccaggccctgatcagccggcttcagtgggacggctcctctgacctctcnccctcngaatcaggctncctccaanacgagtgaaaatcagggatggggtnnagggtacccacagctntgantcccggaaaccaanaaaaaaaatnccntctnancctggtagggaatgcccnccgnctaagtttcannaaaaaaaaaaaaccnaaagcccccggggncccccnaaancccnnnanttttnnatnaaatcnccttnacttgggggcnaagggaaancctttggntnaaaaaaanccnntttccctganccccccccnggnggnaaancnnggnaaaagaancncttctgggggtttgggnctnggnaaacttggggggnccnnnnngcaaanaanncnanntnncccccccgggggggggaaaancccnncnangngannnaannccncnnngggggaanccaancngaannttntnctgnnaaaaaattgggggggggggnttttnttttttntgnnnntnngannncnnnnnnnnnggnnnnnntgnnnttnnnnnnnnnncncccccccccaaaannaanccnnnngnnannnnnccccnnngngnntaaaaanaanggncncnccc

SEQ ID NO: 232 - DNA, 1397 bp, Homo Sapiens
  misc_feature (852)..(852): n is a, c, g, or t
  misc_feature (873)..(873): n is a, c, g, or t
  misc_feature (890)..(890): n is a, c, g, or t
  misc_feature (894)..(894): n is a, c, g, or t
  misc_feature (903)..(903): n is a, c, g, or t
  misc_feature (935)..(935): n is a, c, g, or t
  misc_feature (941)..(941): n is a, c, g, or t
  misc_feature (947)..(948): n is a, c, g, or t
  misc_feature (952)..(952): n is a, c, g, or t
  misc_feature (966)..(966): n is a, c, g, or t
  misc_feature (974)..(974): n is a, c, g, or t
  misc_feature (976)..(976): n is a, c, g, or t
  misc_feature (996)..(996): n is a, c, g, or t
  misc_feature (1003)..(1003): n is a, c, g, or t
  misc_feature (1005)..(1005): n is a, c, g, or t
  misc_feature (1009)..(1009): n is a, c, g, or t
  misc_feature (1021)..(1022): n is a, c, g, or t
  misc_feature (1036)..(1036): n is a, c, g, or t
  misc_feature (1044)..(1044): n is a, c, g, or t
  misc_feature (1049)..(1049): n is a, c, g, or t
  misc_feature (1053)..(1053): n is a, c, g, or t
  misc_feature (1070)..(1071): n is a, c, g, or t
  misc_feature (1075)..(1075): n is a, c, g, or t
  misc_feature (1097)..(1097): n is a, c, g, or t
  misc_feature (1117)..(1117): n is a, c, g, or t
  misc_feature (1119)..(1119): n is a, c, g, or t
  misc_feature (1121)..(1122): n is a, c, g, or t
  misc_feature (1135)..(1135): n is a, c, g, or t
  misc_feature (1138)..(1139): n is a, c, g, or t
  misc_feature (1145)..(1146): n is a, c, g, or t
  misc_feature (1148)..(1150): n is a, c, g, or t
  misc_feature (1161)..(1161): n is a, c, g, or t
  misc_feature (1165)..(1165): n is a, c, g, or t
  misc_feature (1169)..(1169): n is a, c, g, or t
  misc_feature (1179)..(1180): n is a, c, g, or t
  misc_feature (1184)..(1184): n is a, c, g, or t
  misc_feature (1191)..(1192): n is a, c, g, or t
  misc_feature (1197)..(1197): n is a, c, g, or t
  misc_feature (1204)..(1204): n is a, c, g, or t
  misc_feature (1212)..(1212): n is a, c, g, or t
  misc_feature (1223)..(1223): n is a, c, g, or t
  misc_feature (1233)..(1233): n is a, c, g, or t
  misc_feature (1241)..(1241): n is a, c, g, or t
  misc_feature (1246)..(1246): n is a, c, g, or t
  misc_feature (1249)..(1249): n is a, c, g, or t
  misc_feature (1255)..(1255): n is a, c, g, or t
  misc_feature (1257)..(1258): n is a, c, g, or t
  misc_feature (1261)..(1261): n is a, c, g, or t
  misc_feature (1266)..(1268): n is a, c, g, or t
  misc_feature (1273)..(1273): n is a, c, g, or t
  misc_feature (1279)..(1279): n is a, c, g, or t
  misc_feature (1298)..(1298): n is a, c, g, or t
  misc_feature (1302)..(1302): n is a, c, g, or t
  misc_feature (1304)..(1304): n is a, c, g, or t
  misc_feature (1318)..(1320): n is a, c, g, or t
  misc_feature (1328)..(1329): n is a, c, g, or t
  misc_feature (1338)..(1338): n is a, c, g, or t
  misc_feature (1348)..(1349): n is a, c, g, or t
  misc_feature (1354)..(1355): n is a, c, g, or t
  misc_feature (1365)..(1367): n is a, c, g, or t
  misc_feature (1369)..(1369): n is a, c, g, or t
  misc_feature (1373)..(1373): n is a, c, g, or t
  misc_feature (1377)..(1378): n is a, c, g, or t
  misc_feature (1381)..(1381): n is a, c, g, or t
  misc_feature (1383)..(1387): n is a, c, g, or t
  misc_feature (1395)..(1395): n is a, c, g, or t
  misc_feature (1397)..(1397): n is a, c, g, or t
tagagaaattactatgagaggatcgcatcaccatcaccatcacggatcctatttaggtgacactatagaatcgtcgacccacgcgtccgatccttgggccgctgggcaagcggcgagacctggccagggccagcgagccgaggacagagggcgcacggagggccgggccgcagccccggccgcttgcagaccccgccatggacccgttcctggtgctgctgcactcggtgtcgtccagcctgtcgagcagcgagctgaccgagctcaagttcctatgcctcgggcgcgtgggcaagcgcaagctggagcgcgtgcagagcggcctagacctcttctccatgctgctggagcagaacgacctggagcccgggcacaccgagctcctgcgcgagctgctcgcctccctgcggcgccacgacctgctgcggcgcgtcgacgacttcgaggcgggggcggcggccggggccgcgcctggggaagaagacctgtgtgcagcatttaacgtcatatgtgataatgtggggaaagattggagaaggctggctcgtcagctcaaagtctcagacaccaagatcgacagcatcgaggacagatacccccgcaacctgacagagcgtgtgcgggagtcactgagaatctggaagaacacagagaaggagaacgcaacagtggcccacctggtgggggctctcaggtcctgccagatgaacctggtggctgacctggtacaagaggttcagcaggcccgtgacctccagaacaggagtggggccatgtccccgatgtcatggaactcagacgcatctacctccgaagcgtcctgatgggccgctgctttgcgctggtggaacnacaggcatctacacagcctgnactttggttctctccangaangtaccccancactgtgaaaacccaccaagaaacccaggctnattgancccacnnaacnacctgcttttgaantcaagctncnttttattaatgcctctcccncaccagncngggnttgggccctgcnnaaaatttccatttntttcctcnttatnaaantgaacaaaatctttttnnccantaaataaactcctgccggaaanatttgaaaatttgaaacctntncnnacaaaaaagaatnttnncaaaannannnttccctttttncccncacnggaagaaaanncctnaaggccnnaaatngaacaancaaaaagnggaaaattgantttaaccccncttttttnaaaancantaaacntnnggnttttnnnccccnaattanaaaaaattttttccttttntttngncccggaaaaacttnnntttttatnnttttttttnaaaaaaattnnggggnnaaaaatttcnnnancctncccnntanannnnntaaaaaanan

SEQ ID NO: 233 - DNA, 1135 bp, Homo Sapiens
  misc_feature (7)..(7): n is a, c, g, or t
  misc_feature (13)..(13): n is a, c, g, or t
  misc_feature (716)..(716): n is a, c, g, or t
  misc_feature (736)..(736): n is a, c, g, or t
  misc_feature (755)..(755): n is a, c, g, or t
  misc_feature (798)..(798): n is a, c, g, or t
  misc_feature (815)..(815): n is a, c, g, or t
  misc_feature (818)..(818): n is a, c, g, or t
  misc_feature (845)..(845): n is a, c, g, or t
  misc_feature (848)..(848): n is a, c, g, or t
  misc_feature (878)..(878): n is a, c, g, or t
  misc_feature (880)..(880): n is a, c, g, or t
  misc_feature (886)..(886): n is a, c, g, or t
  misc_feature (896)..(896): n is a, c, g, or t
  misc_feature (906)..(906): n is a, c, g, or t
  misc_feature (952)..(952): n is a, c, g, or t
  misc_feature (957)..(957): n is a, c, g, or t
  misc_feature (959)..(959): n is a, c, g, or t
  misc_feature (981)..(982): n is a, c, g, or t
  misc_feature (989)..(990): n is a, c, g, or t
  misc_feature (998)..(998): n is a, c, g, or t
  misc_feature (1002)..(1002): n is a, c, g, or t
  misc_feature (1005)..(1005): n is a, c, g, or t
  misc_feature (1008)..(1009): n is a, c, g, or t
  misc_feature (1013)..(1013): n is a, c, g, or t
  misc_feature (1016)..(1016): n is a, c, g, or t
  misc_feature (1024)..(1024): n is a, c, g, or t
  misc_feature (1027)..(1028): n is a, c, g, or t
  misc_feature (1035)..(1037): n is a, c, g, or t
  misc_feature (1043)..(1044): n is a, c, g, or t
  misc_feature (1052)..(1053): n is a, c, g, or t
  misc_feature (1061)..(1061): n is a, c, g, or t
  misc_feature (1063)..(1063): n is a, c, g, or t
  misc_feature (1067)..(1067): n is a, c, g, or t
  misc_feature (1070)..(1070): n is a, c, g, or t
  misc_feature (1075)..(1077): n is a, c, g, or t
  misc_feature (1081)..(1081): n is a, c, g, or t
  misc_feature (1100)..(1100): n is a, c, g, or t
  misc_feature (1116)..(1116): n is a, c, g, or t
  misc_feature (1123)..(1123): n is a, c, g, or t
  misc_feature (1130)..(1130): n is a, c, g, or t
  misc_feature (1133)..(1133): n is a, c, g, or t
aagaatnagaganaattactatgagaggatcgcatcaccatcaccattcacggatcctatttaggtgacactatagaatcgtcgacccacgcgtccgggcaaaaagagaagaaagaaaggggagggggcgagtcacaggcggcggtggcggcggcagcagctgccggagcggaggcaacgagcagtccgagaaaaaccagcagcagcggcggcggcggcggcggcggcgcccaccccgaccagctgcagcatctgcatccccgctcctgggaactggagcgagcggtgccgggccagcaggcgaggggggcgacgcgcagacagcgggtcagagcgcgggcgcgcggggaccgtgcagcctgcgcgcggggccatgtaaactatctaactgtggtgtggccctcttttctctgccatagcaattcaagaatcagaggtgatttgctcttgatgggagacatgaactattatatcatcagttgaacctgcttttagccactgagcagagcaaaacaataagatccaatacaccaactgtgatggttaatactgtcaacttgattggattgaacaatgcaaagtattgatcctgggtgtgtctgtgtgggtgttgccaaaggagattaacatttgagtcagtgggctggggaaggcagacccacccttaacctggtgggcacagtctaatcagctgccagtgaatatgaagcaggaanaaagacagtgaaaaggtganactggcctggcctccccanccctacatctttctcccatgctggatgcttcctgtcctcaaanactggaactccacgttnttncacttttgaaaacttgaaactgggctngtnccttttgcctccttcaaagctttgcaaaanangccctnattgtggggnaaactttgtnaattgtggtaaaattgaaatattaccaataaaattttccccctttntaatntnattattattatattttaatatnntatattnntattttanattnttntcnncccnggnaaaaattnttnntcccctnnntagggnnaaccctgnnatttattntncccnacnaccannnaatntttttatttttttgggggnaaaaaaaaaaaaaatncctttgncaaaaanaanaa

SEQ ID NO: 234 - DNA, 1358 bp, Homo Sapiens
  misc_feature (2)..(2): n is a, c, g, or t
  misc_feature (800)..(800): n is a, c, g, or t
  misc_feature (869)..(869): n is a, c, g, or t
  misc_feature (879)..(880): n is a, c, g, or t
  misc_feature (896)..(896): n is a, c, g, or t
  misc_feature (910)..(910): n is a, c, g, or t
  misc_feature (917)..(917): n is a, c, g, or t
  misc_feature (922)..(922): n is a, c, g, or t
  misc_feature (926)..(927): n is a, c, g, or t
  misc_feature (929)..(929): n is a, c, g, or t
  misc_feature (934)..(934): n is a, c, g, or t
  misc_feature (938)..(938): n is a, c, g, or t
  misc_feature (943)..(943): n is a, c, g, or t
  misc_feature (948)..(948): n is a, c, g, or t
  misc_feature (953)..(953): n is a, c, g, or t
  misc_feature (960)..(960): n is a, c, g, or t
  misc_feature (971)..(971): n is a, c, g, or t
  misc_feature (973)..(973): n is a, c, g, or t
  misc_feature (983)..(983): n is a, c, g, or t
  misc_feature (986)..(986): n is a, c, g, or t
  misc_feature (994)..(994): n is a, c, g, or t
  misc_feature (1008)..(1008): n is a, c, g, or t
  misc_feature (1012)..(1012): n is a, c, g, or t
  misc_feature (1014)..(1014): n is a, c, g, or t
  misc_feature (1018)..(1020): n is a, c, g, or t
  misc_feature (1022)..(1022): n is a, c, g, or t
  misc_feature (1024)..(1025): n is a, c, g, or t
  misc_feature (1029)..(1030): n is a, c, g, or t
  misc_feature (1032)..(1032): n is a, c, g, or t
  misc_feature (1034)..(1034): n is a, c, g, or t
  misc_feature (1039)..(1039): n is a, c, g, or t
  misc_feature (1043)..(1043): n is a, c, g, or t
  misc_feature (1045)..(1045): n is a, c, g, or t
  misc_feature (1048)..(1048): n is a, c, g, or t
  misc_feature (1053)..(1053): n is a, c, g, or t
  misc_feature (1059)..(1061): n is a, c, g, or t
  misc_feature (1066)..(1069): n is a, c, g, or t
  misc_feature (1073)..(1073): n is a, c, g, or t
  misc_feature (1078)..(1078): n is a, c, g, or t
  misc_feature (1082)..(1082): n is a, c, g, or t
  misc_feature (1085)..(1085): n is a, c, g, or t
  misc_feature (1089)..(1089): n is a, c, g, or t
  misc_feature (1092)..(1093): n is a, c, g, or t
  misc_feature (1099)..(1099): n is a, c, g, or t
  misc_feature (1104)..(1104): n is a, c, g, or t
  misc_feature (1109)..(1110): n is a, c, g, or t
  misc_feature (1112)..(1112): n is a, c, g, or t
  misc_feature (1115)..(1115): n is a, c, g, or t
  misc_feature (1117)..(1117): n is a, c, g, or t
  misc_feature (1128)..(1128): n is a, c, g, or t
  misc_feature (1137)..(1137): n is a, c, g, or t
  misc_feature (1143)..(1143): n is a, c, g, or t
  misc_feature (1149)..(1149): n is a, c, g, or t
  misc_feature (1152)..(1152): n is a, c, g, or t
  misc_feature (1159)..(1159): n is a, c, g, or t
  misc_feature (1166)..(1167): n is a, c, g, or t
  misc_feature (1176)..(1176): n is a, c, g, or t
  misc_feature (1183)..(1183): n is a, c, g, or t
  misc_feature (1185)..(1186): n is a, c, g, or t
  misc_feature (1190)..(1190): n is a, c, g, or t
  misc_feature (1197)..(1197): n is a, c, g, or t
  misc_feature (1202)..(1202): n is a, c, g, or t
  misc_feature (1205)..(1208): n is a, c, g, or t
  misc_feature (1216)..(1217): n is a, c, g, or t
  misc_feature (1221)..(1221): n is a, c, g, or t
  misc_feature (1224)..(1226): n is a, c, g, or t
  misc_feature (1229)..(1229): n is a, c, g, or t
  misc_feature (1232)..(1234): n is a, c, g, or t
  misc_feature (1236)..(1237): n is a, c, g, or t
  misc_feature (1239)..(1239): n is a, c, g, or t
  misc_feature (1244)..(1244): n is a, c, g, or t
  misc_feature (1249)..(1250): n is a, c, g, or t
  misc_feature (1252)..(1252): n is a, c, g, or t
  misc_feature (1258)..(1258): n is a, c, g, or t
  misc_feature (1276)..(1276): n is a, c, g, or t
  misc_feature (1278)..(1280): n is a, c, g, or t
  misc_feature (1283)..(1285): n is a, c, g, or t
  misc_feature (1289)..(1291): n is a, c, g, or t
  misc_feature (1299)..(1299): n is a, c, g, or t
  misc_feature (1301)..(1301): n is a, c, g, or t
  misc_feature (1303)..(1303): n is a, c, g, or t
  misc_feature (1307)..(1307): n is a, c, g, or t
  misc_feature (1309)..(1310): n is a, c, g, or t
  misc_feature (1318)..(1320): n is a, c, g, or t
  misc_feature (1323)..(1323): n is a, c, g, or t
  misc_feature (1326)..(1326): n is a, c, g, or t
  misc_feature (1328)..(1329): n is a, c, g, or t
  misc_feature (1331)..(1332): n is a, c, g, or t
  misc_feature (1337)..(1337): n is a, c, g, or t
  misc_feature (1339)..(1341): n is a, c, g, or t
  misc_feature (1345)..(1346): n is a, c, g, or t
  misc_feature (1351)..(1354): n is a, c, g, or t
  misc_feature (1357)..(1357): n is a, c, g, or t
cnaatagagagaattactatgagaggatcgcatcaccatcaccatcacggatcctatttaggtgacactatagaatcgtcgacccacgcgtccgcccacgcgtccgcccacgcgtccgaggctagcctgcgagccacctcctctactcagtctctagctcgcctgggttctcccgattatggcaactcagccctgctcagcttgcctggctaccgccccaccactcgcagttctgctcgtcgttcccaggccggggtgtccagtggggcccctccaggaaggaacagcttctacatgggcacttgccaggatgagcctgagcagctggatgactggaaccgcattgcagagctgcagcagcgcaatcgagtgtgccccccacatctgaagacctgctatcccctggagtccaggccttccctgagcctgggcaccatcacagatgaggagatgaaaactggagacccccaagagaccctgcgccgagccagcatgcagccaatccagatagccgagggcactggcatcaccacccggcagcagcgcaaacgggtctccctagagccccaccagggccctggaactcctgagtctaagaaggccaccagctgtttcccacgccccatgactccccgagaccgacatgaagggcgcaaacagagcactactgaggcccagaagaaagcagctccagcttctactaaacaggctgaccggcgccagtcgatggccttcagcatcctcaacacacccaagaagctagggaacagccttctgcggcggggagcctcaaagaaggncctgtccaaggcttcccccaacactcgcagtggaacccgccgttctccgcgcattgccaccaccacagncagcgccgcnntgctgccgccattggngccacccctcgagncaagggnaaggnaaannantaaangggncaatnaccantgagnggcccanctgtgtccccnangctgccgtanctnggtctccncccaaatgtccctntaangncttnnntnanntccnngncnaaaantaancnaanccctnaaaaannnatgcnnnncccnacccnggcnggncccnggnnctttantgggnccttnntnaantngcccaaggggnctgaaaaangaaaangggggnccntccccancttgccnnttttttttnaaaaaantnntttncctaaancaaanttnnnngggttttnnaggnggnnnttnggnnngnnanttttntttanntnggaatnaaaagaaaaaaaaaaaancnnnttnnntttnnngggggggncnanaggncnntttttaannnaangtntnnannggaancnnnaaannttttnnnngang

SEQ ID NO: 235 - DNA, 1392 bp, Homo Sapiens
  misc_feature (1)..(1): n is a, c, g, or t
  misc_feature (893)..(893): n is a, c, g, or t
  misc_feature (930)..(930): n is a, c, g, or t
  misc_feature (992)..(992): n is a, c, g, or t
  misc_feature (1005)..(1005): n is a, c, g, or t
  misc_feature (1026)..(1026): n is a, c, g, or t
  misc_feature (1034)..(1034): n is a, c, g, or t
  misc_feature (1036)..(1037): n is a, c, g, or t
  misc_feature (1051)..(1051): n is a, c, g, or t
  misc_feature (1060)..(1061): n is a, c, g, or t
  misc_feature (1076)..(1078): n is a, c, g, or t
  misc_feature (1080)..(1080): n is a, c, g, or t
  misc_feature (1093)..(1093): n is a, c, g, or t
  misc_feature (1099)..(1100): n is a, c, g, or t
  misc_feature (1132)..(1132): n is a, c, g, or t
  misc_feature (1144)..(1144): n is a, c, g, or t
  misc_feature (1146)..(1146): n is a, c, g, or t
  misc_feature (1156)..(1156): n is a, c, g, or t
  misc_feature (1163)..(1163): n is a, c, g, or t
  misc_feature (1166)..(1166): n is a, c, g, or t
  misc_feature (1177)..(1177): n is a, c, g, or t
  misc_feature (1179)..(1179): n is a, c, g, or t
  misc_feature (1183)..(1183): n is a, c, g, or t
  misc_feature (1188)..(1188): n is a, c, g, or t
  misc_feature (1190)..(1190): n is a, c, g, or t
  misc_feature (1204)..(1204): n is a, c, g, or t
  misc_feature (1220)..(1220): n is a, c, g, or t
  misc_feature (1247)..(1247): n is a, c, g, or t
  misc_feature (1257)..(1257): n is a, c, g, or t
  misc_feature (1266)..(1266): n is a, c, g, or t
  misc_feature (1270)..(1270): n is a, c, g, or t
  misc_feature (1272)..(1272): n is a, c, g, or t
  misc_feature (1274)..(1274): n is a, c, g, or t
  misc_feature (1278)..(1279): n is a, c, g, or t
  misc_feature (1285)..(1287): n is a, c, g, or t
  misc_feature (1290)..(1290): n is a, c, g, or t
  misc_feature (1293)..(1293): n is a, c, g, or t
  misc_feature (1298)..(1299): n is a, c, g, or t
  misc_feature (1302)..(1302): n is a, c, g, or t
  misc_feature (1307)..(1307): n is a, c, g, or t
  misc_feature (1314)..(1314): n is a, c, g, or t
  misc_feature (1320)..(1320): n is a, c, g, or t
  misc_feature (1323)..(1323): n is a, c, g, or t
  misc_feature (1334)..(1334): n is a, c, g, or t
  misc_feature (1339)..(1339): n is a, c, g, or t
  misc_feature (1347)..(1347): n is a, c, g, or t
  misc_feature (1350)..(1350): n is a, c, g, or t
  misc_feature (1357)..(1357): n is a, c, g, or t
  misc_feature (1362)..(1362): n is a, c, g, or t
  misc_feature (1366)..(1366): n is a, c, g, or t
  misc_feature (1381)..(1381): n is a, c, g, or t
  misc_feature (1385)..(1385): n is a, c, g, or t
  misc_feature (1391)..(1392): n is a, c, g, or t
natagagaaattactatgagaggatcgcatcaccatcaccatcacggatcctatttaggtgacactatagaatcgtcgacccacgcgtccgcggacgcgtgggctgcgagaatgaagactattctcagcaatcagactgtcgacattccagaaaatgtcgacattactctgaagggacgcacagttatcgtgaagggccccagaggaaccctgcggagggacttcaatcacatcaatgtagaactcagccttcttggaaagaaaaaaaagaggctccgggttgacaaatggtggggtaacagaaaggaactggctaccgttcggactatttgtagtcatgtacagaacatgatcaagggtgttacactgggcttccgttacaagatgaggtctgtgtatgctcacttccccatcaacgttgttatccaggagaatgggtctcttgttgaaatccgaaatttcttgggtgaaaaatacatccgcagggttcggatgagaccaggtgttgcttgttcagtatctcaagcccagaaagatgaattaatccttgaaggaaatgacattgagcttgtttcaaattcagcggctttgattcagcaagccacaacagttaaaaacaaggatatcaggaaatttttggatggtatctatgtctctgaaaaaggaactgttcagcaggctgatgaataagatctaagagttacctggctacagaaagaagatgccagatgacacttaagacctacttgtgatatttaaatgatgcaataaaagacctattgatttggaaaaaaaaaaaaaaaaaaaaaaggcggccgctccctatagtgagtcgtattaagcttaattagctgagcttggactcctgttgatagatccagtaatgacctcanaactccatctggatttgttcaaaacgctcggttgccnccgggcgttttttattggtgaaaatccaagctagctgggcgaaattttcaggagctaaggangctaaaatggganaaaaaatccctggaaataccnccgttgananntccccaaggcctcntaaaaaaannttttgaggcattccnnncngttgccccaatgnaccctnnaaccaaaccgttccccctggaaattaccgccntttttaaaaccngnaaaaaaaaanaaacccnaanttttatccggncntttntccantncttgccccccgaanaaagccccccccgaanttccattggcataaaaaacgggaaccngggaattggnaaaaggttncccntntnaccnnttttcnnnaanaantaaannttnccccnctggggngaaacncanaaattccgggntttcncaattttnccnaaagggnggttncggnaaaccccccctttcncaanggtttnn

SEQ ID NO: 236 - DNA, 1506 bp, Homo Sapiens
  misc_feature (6)..(6): n is a, c, g, or t
  misc_feature (12)..(12): n is a, c, g, or t
  misc_feature (32)..(33): n is a, c, g, or t
  misc_feature (37)..(37): n is a, c, g, or t
  misc_feature (39)..(39): n is a, c, g, or t
  misc_feature (54)..(54): n is a, c, g, or t
  misc_feature (61)..(61): n is a, c, g, or t
  misc_feature (67)..(67): n is a, c, g, or t
  misc_feature (88)..(88): n is a, c, g, or t
  misc_feature (97)..(97): n is a, c, g, or t
  misc_feature (143)..(144): n is a, c, g, or t
  misc_feature (211)..(211): n is a, c, g, or t
  misc_feature (378)..(378): n is a, c, g, or t
  misc_feature (383)..(383): n is a, c, g, or t
  misc_feature (447)..(447): n is a, c, g, or t
  misc_feature (542)..(542): n is a, c, g, or t
  misc_feature (562)..(562): n is a, c, g, or t
  misc_feature (625)..(625): n is a, c, g, or t
  misc_feature (633)..(633): n is a, c, g, or t
  misc_feature (653)..(653): n is a, c, g, or t
  misc_feature (680)..(680): n is a, c, g, or t
  misc_feature (702)..(702): n is a, c, g, or t
  misc_feature (704)..(704): n is a, c, g, or t
  misc_feature (713)..(713): n is a, c, g, or t
  misc_feature (736)..(736): n is a, c, g, or t
  misc_feature (747)..(747): n is a, c, g, or t
  misc_feature (752)..(752): n is a, c, g, or t
  misc_feature (760)..(761): n is a, c, g, or t
  misc_feature (765)..(765): n is a, c, g, or t
  misc_feature (769)..(769): n is a, c, g, or t
  misc_feature (778)..(778): n is a, c, g, or t
  misc_feature (780)..(780): n is a, c, g, or t
  misc_feature (787)..(787): n is a, c, g, or t
  misc_feature (794)..(795): n is a, c, g, or t
  misc_feature (801)..(801): n is a, c, g, or t
  misc_feature (805)..(805): n is a, c, g, or t
  misc_feature (807)..(807): n is a, c, g, or t
  misc_feature (818)..(818): n is a, c, g, or t
  misc_feature (824)..(824): n is a, c, g, or t
  misc_feature (837)..(837): n is a, c, g, or t
  misc_feature (840)..(840): n is a, c, g, or t
  misc_feature (842)..(842): n is a, c, g, or t
  misc_feature (847)..(849): n is a, c, g, or t
  misc_feature (853)..(853): n is a, c, g, or t
  misc_feature (860)..(861): n is a, c, g, or t
  misc_feature (868)..(868): n is a, c, g, or t
  misc_feature (870)..(871): n is a, c, g, or t
  misc_feature (873)..(873): n is a, c, g, or t
  misc_feature (875)..(876): n is a, c, g, or t
  misc_feature (879)..(879): n is a, c, g, or t
  misc_feature (885)..(885): n is a, c, g, or t
  misc_feature (888)..(889): n is a, c, g, or t
  misc_feature (891)..(891): n is a, c, g, or t
  misc_feature (898)..(901): n is a, c, g, or t
  misc_feature (903)..(903): n is a, c, g, or t
  misc_feature (917)..(917): n is a, c, g, or t
  misc_feature (922)..(923): n is a, c, g, or t
  misc_feature (926)..(926): n is a, c, g, or t
  misc_feature (928)..(928): n is a, c, g, or t
  misc_feature (930)..(930): n is a, c, g, or t
  misc_feature (932)..(932): n is a, c, g, or t
  misc_feature (934)..(934): n is a, c, g, or t
  misc_feature (938)..(938): n is a, c, g, or t
  misc_feature (942)..(943): n is a, c, g, or t
  misc_feature (945)..(945): n is a, c, g, or t
  misc_feature (948)..(948): n is a, c, g, or t
  misc_feature (952)..(953): n is a, c, g, or t
  misc_feature (955)..(957): n is a, c, g, or t
  misc_feature (959)..(959): n is a, c, g, or t
  misc_feature (963)..(963): n is a, c, g, or t
  misc_feature (966)..(966): n is a, c, g, or t
  misc_feature (968)..(970): n is a, c, g, or t
  misc_feature (974)..(974): n is a, c, g, or t
  misc_feature (977)..(977): n is a, c, g, or t
  misc_feature (980)..(983): n is a, c, g, or t
  misc_feature (985)..(985): n is a, c, g, or t
  misc_feature (991)..(991): n is a, c, g, or t
  misc_feature (993)..(994): n is a, c, g, or t
  misc_feature (998)..(998): n is a, c, g, or t
  misc_feature (1000)..(1000): n is a, c, g, or t
  misc_feature (1006)..(1007): n is a, c, g, or t
  misc_feature (1012)..(1012): n is a, c, g, or t
  misc_feature (1015)..(1016): n is a, c, g, or t
  misc_feature (1021)..(1021): n is a, c, g, or t
  misc_feature (1024)..(1024): n is a, c, g, or t
  misc_feature (1026)..(1027): n is a, c, g, or t
  misc_feature (1030)..(1030): n is a, c, g, or t
  misc_feature (1032)..(1033): n is a, c, g, or t
  misc_feature (1037)..(1037): n is a, c, g, or t
  misc_feature (1039)..(1040): n is a, c, g, or t
  misc_feature (1043)..(1044): n is a, c, g, or t
  misc_feature (1046)..(1046): n is a, c, g, or t
  misc_feature (1050)..(1050): n is a, c, g, or t
  misc_feature (1053)..(1054): n is a, c, g, or t
  misc_feature (1059)..(1059): n is a, c, g, or t
  misc_feature (1061)..(1061): n is a, c, g, or t
  misc_feature (1063)..(1063): n is a, c, g, or t
  misc_feature (1068)..(1068): n is a, c, g, or t
  misc_feature (1071)..(1071): n is a, c, g, or t
  misc_feature (1075)..(1075): n is a, c, g, or t
  misc_feature (1080)..(1080): n is a, c, g, or t
  misc_feature (1082)..(1082): n is a, c, g, or t
  misc_feature (1085)..(1087): n is a, c, g, or t
  misc_feature (1090)..(1090): n is a, c, g, or t
  misc_feature (1098)..(1098): n is a, c, g, or t
  misc_feature (1106)..(1106): n is a, c, g, or t
  misc_feature (1109)..(1111): n is a, c, g, or t
  misc_feature (1114)..(1115): n is a, c, g, or t
  misc_feature (1117)..(1119): n is a, c, g, or t
  misc_feature (1121)..(1121): n is a, c, g, or t
  misc_feature (1124)..(1124): n is a, c, g, or t
  misc_feature (1126)..(1126): n is a, c, g, or t
  misc_feature (1129)..(1129): n is a, c, g, or t
  misc_feature (1134)..(1135): n is a, c, g, or t
  misc_feature (1137)..(1137): n is a, c, g, or t
  misc_feature (1139)..(1139): n is a, c, g, or t
  misc_feature (1144)..(1145): n is a, c, g, or t
  misc_feature (1148)..(1149): n is a, c, g, or t
  misc_feature (1152)..(1153): n is a, c, g, or t
  misc_feature (1158)..(1158): n is a, c, g, or t
  misc_feature (1172)..(1172): n is a, c, g, or t
  misc_feature (1176)..(1176): n is a, c, g, or t
  misc_feature (1179)..(1179): n is a, c, g, or t
  misc_feature (1182)..(1183): n is a, c, g, or t
  misc_feature (1188)..(1188): n is a, c, g, or t
  misc_feature (1198)..(1198): n is a, c, g, or t
  misc_feature (1201)..(1201): n is a, c, g, or t
  misc_feature (1203)..(1204): n is a, c, g, or t
  misc_feature (1207)..(1208): n is a, c, g, or t
  misc_feature (1214)..(1214): n is a, c, g, or t
  misc_feature (1219)..(1219): n is a, c, g, or t
  misc_feature (1224)..(1224): n is a, c, g, or t
  misc_feature (1226)..(1226): n is a, c, g, or t
  misc_feature (1230)..(1230): n is a, c, g, or t
  misc_feature (1237)..(1237): n is a, c, g, or t
  misc_feature (1240)..(1241): n is a, c, g, or t
  misc_feature (1243)..(1243): n is a, c, g, or t
  misc_feature (1249)..(1249): n is a, c, g, or t
  misc_feature (1254)..(1255): n is a, c, g, or t
  misc_feature (1260)..(1260): n is a, c, g, or t
  misc_feature (1266)..(1268): n is a, c, g, or t
  misc_feature (1272)..(1272): n is a, c, g, or t
  misc_feature (1274)..(1274): n is a, c, g, or t
  misc_feature (1279)..(1280): n is a, c, g, or t
  misc_feature (1282)..(1282): n is a, c, g, or t
  misc_feature (1287)..(1288): n is a, c, g, or t
  misc_feature (1299)..(1299): n is a, c, g, or t
  misc_feature (1303)..(1303): n is a, c, g, or t
  misc_feature (1307)..(1308): n is a, c, g, or t
  misc_feature (1320)..(1321): n is a, c, g, or t
  misc_feature (1324)..(1325): n is a, c, g, or t
  misc_feature (1334)..(1334): n is a, c, g, or t
  misc_feature (1336)..(1336): n is a, c, g, or t
  misc_feature (1350)..(1350): n is a, c, g, or t
  misc_feature (1355)..(1355): n is a, c, g, or t
  misc_feature (1358)..(1358): n is a, c, g, or t
  misc_feature (1360)..(1364): n is a, c, g, or t
  misc_feature (1370)..(1370): n is a, c, g, or t
  misc_feature (1372)..(1374): n is a, c, g, or t
  misc_feature (1378)..(1380): n is a, c, g, or t
  misc_feature (1386)..(1386): n is a, c, g, or t
  misc_feature (1389)..(1389): n is a, c, g, or t
  misc_feature (1391)..(1392): n is a, c, g, or t
  misc_feature (1395)..(1395): n is a, c, g, or t
  misc_feature (1397)..(1398): n is a, c, g, or t
  misc_feature (1402)..(1402): n is a, c, g, or t
  misc_feature (1409)..(1409): n is a, c, g, or t
  misc_feature (1412)..(1412): n is a, c, g, or t
  misc_feature (1421)..(1421): n is a, c, g, or t
  misc_feature (1423)..(1424): n is a, c, g, or t
  misc_feature (1436)..(1436): n is a, c, g, or t
  misc_feature (1439)..(1440): n is a, c, g, or t
  misc_feature (1443)..(1443): n is a, c, g, or t
  misc_feature (1446)..(1447): n is a, c, g, or t
  misc_feature (1450)..(1450): n is a, c, g, or t
  misc_feature (1455)..(1455): n is a, c, g, or t
  misc_feature (1458)..(1460): n is a, c, g, or t
  misc_feature (1465)..(1466): n is a, c, g, or t
  misc_feature (1468)..(1468): n is a, c, g, or t
  misc_feature (1471)..(1471): n is a, c, g, or t
  misc_feature (1473)..(1473): n is a, c, g, or t
  misc_feature (1477)..(1477): n is a, c, g, or t
  misc_feature (1482)..(1482): n is a, c, g, or t
  misc_feature (1487)..(1487): n is a, c, g, or t
  misc_feature (1492)..(1492): n is a, c, g, or t
  misc_feature (1496)..(1496): n is a, c, g, or t
taagangagaantacttaatgtagaggatggnntcancntcaccatcacggatnctatttngtgtgncacatataaaatcgtcgaccnacgcgctcngataaacttctgcactggaggggcctctcctcccctcgttctgcanntggagctctaatccccacgcctgggatgagtgcagaatatgccccgcagggtatttgtaaagatgancccagcagctacacatgtacaacttgcaaacagccattcaccagtgcatggtttctcttgcaacacgcacagaacactcatggattaagaatctacttagaaagcgaacacggaagtcccctgaccccgcgggttcttcacacacccccattcggcgtagtacccanagtgntcaagatgtgtggcagttttcggatggaagctcgagagcccttaagttctgagaaaatttgaancccccaggggtggggtggacgcgtgccgcccagtcgacgtcagcgtggtctgtcatcctgctagtttgtgatgttttctgacagtagcctccatnaagccgttgtgcgaagacangaaccctgcagagtccttccagcctaggcctgcagcgccattttatttatattttttaataanaagtaaanacataaaaacagacccctcnttggaacagtggaatcagtcccataanaaaagggcccggtggaccatcncntgtcatgantgatgcccctgggaccctttctngaaaccagccnacctnaattaccnngtanttgnggaaaatgncncatgaantcccaanncccctngttncnaaaccattccnatggtngcccttgttaaanaantntggcnnnaacnattgganncaaacananngntnngantttttnaannangaataannnncngaaagaaaagtacnaaaannctnanantntnaatncaannanagnaaannannnanaagnggngnnnctcnccnaannnntnggcccnannaacntnattaannggacntannccccnccngnngananntcancnntannancctnaanntcctnananaaatngtntatnacccncntannnacntgggattnttttattnggnnnaanncnnnanacntnggnaaaanntntnaaatnnatnntgnnaaaangaaaaaaataacangtgnatnccnnccgtnaaaaatcacnagnannccnnagaaanttttngcgantnctanacatttntanngncaaaancctanntatcnattgannnattncntcttnnanatctnntcatgataacncaantgtnnatcggtttattnnatnntgtcccganancagacaatcgatantcgtntanannnnngtacangnnnttannncaagtnccncnntantnntcancattacnatntactctatncnngtagagaacgangannatngtnnctntatantcnnnaggcnngngcnanatcntccancttcnatgtntatncatgctcccc

SEQ ID NO: 237 - DNA, 1348 bp, Homo Sapiens
  misc_feature (834)..(834): n is a, c, g, or t
  misc_feature (877)..(877): n is a, c, g, or t
  misc_feature (897)..(897): n is a, c, g, or t
  misc_feature (928)..(928): n is a, c, g, or t
  misc_feature (941)..(941): n is a, c, g, or t
  misc_feature (943)..(943): n is a, c, g, or t
  misc_feature (951)..(951): n is a, c, g, or t
  misc_feature (965)..(965): n is a, c, g, or t
  misc_feature (971)..(971): n is a, c, g, or t
  misc_feature (979)..(979): n is a, c, g, or t
  misc_feature (981)..(981): n is a, c, g, or t
  misc_feature (1026)..(1026): n is a, c, g, or t
  misc_feature (1037)..(1037): n is a, c, g, or t
  misc_feature (1053)..(1053): n is a, c, g, or t
  misc_feature (1055)..(1055): n is a, c, g, or t
  misc_feature (1057)..(1059): n is a, c, g, or t
  misc_feature (1069)..(1069): n is a, c, g, or t
  misc_feature (1073)..(1073): n is a, c, g, or t
  misc_feature (1081)..(1081): n is a, c, g, or t
  misc_feature (1087)..(1087): n is a, c, g, or t
  misc_feature (1093)..(1093): n is a, c, g, or t
  misc_feature (1098)..(1098): n is a, c, g, or t
  misc_feature (1102)..(1103): n is a, c, g, or t
  misc_feature (1111)..(1111): n is a, c, g, or t
  misc_feature (1124)..(1124): n is a, c, g, or t
  misc_feature (1127)..(1128): n is a, c, g, or t
  misc_feature (1134)..(1134): n is a, c, g, or t
  misc_feature (1138)..(1138): n is a, c, g, or t
  misc_feature (1142)..(1142): n is a, c, g, or t
  misc_feature (1144)..(1144): n is a, c, g, or t
  misc_feature (1159)..(1159): n is a, c, g, or t
  misc_feature (1161)..(1161): n is a, c, g, or t
  misc_feature (1166)..(1166): n is a, c, g, or t
  misc_feature (1169)..(1169): n is a, c, g, or t
  misc_feature (1179)..(1179): n is a, c, g, or t
  misc_feature (1183)..(1183): n is a, c, g, or t
  misc_feature (1188)..(1188): n is a, c, g, or t
  misc_feature (1190)..(1191): n is a, c, g, or t
  misc_feature (1196)..(1196): n is a, c, g, or t
  misc_feature (1199)..(1201): n is a, c, g, or t
  misc_feature (1205)..(1205): n is a, c, g, or t
  misc_feature (1220)..(1222): n is a, c, g, or t
  misc_feature (1224)..(1224): n is a, c, g, or t
  misc_feature (1241)..(1241): n is a, c, g, or t
  misc_feature (1253)..(1255): n is a, c, g, or t
  misc_feature (1258)..(1258): n is a, c, g, or t
  misc_feature (1261)..(1261): n is a, c, g, or t
  misc_feature (1266)..(1266): n is a, c, g, or t
  misc_feature (1275)..(1275): n is a, c, g, or t
  misc_feature (1279)..(1280): n is a, c, g, or t
  misc_feature (1289)..(1289): n is a, c, g, or t
  misc_feature (1295)..(1295): n is a, c, g, or t
  misc_feature (1297)..(1297): n is a, c, g, or t
  misc_feature (1307)..(1307): n is a, c, g, or t
  misc_feature (1312)..(1313): n is a, c, g, or t
  misc_feature (1315)..(1315): n is a, c, g, or t
  misc_feature (1317)..(1319): n is a, c, g, or t
  misc_feature (1323)..(1323): n is a, c, g, or t
  misc_feature (1326)..(1328): n is a, c, g, or t
  misc_feature (1330)..(1333): n is a, c, g, or t
  misc_feature (1335)..(1336): n is a, c, g, or t
  misc_feature (1343)..(1344): n is a, c, g, or t
  misc_feature (1347)..(1348): n is a, c, g, or t
gagaaaattactatgagaggatcgcatcaccatcaccatcacggatcctatttaggtgacactatagaatcgtcgacccacgcgtccggcgcgcacttccgggcacggtcagggcgtgacgtcgggaggagggcagacacgccgctttttggatgcctcctatgcctggcgggagtcttgtctgagctggcaccaccacacggcccacgacatcttcgcagggaagcctgtggaccctctgccaggctccacaagaggtcaggacagtgcagtgtgttcacaaggccagtttctgatcgtccgccccgaggctgaggaccagtaggcagctcccaagatgggtgaaaggaaaggggtcaacaagtactatcctccagacttcaaccctgagaagcatggctctctcaaccgataccacaacagccacccgcttcgggagcgggctcggaagctgtcacagggcatcctcatcatccgattcgaaatgccatataacatctggtgcgatggctgcaagaaccacatcggcatgggtgttcgttacaatgcagaaaagaagaaggtgggcaattactacacaaccccgatctacaggttccggatgaaatgccacctctgtgtcaactacatcgagatgcagacggaccccgccaactgcgactacgtgatcgtgagtggcgcccagcgcaaggaggagcgctgggacatggcggacaatgagcaggtgctgaccacaggtgagcgccacccacttacctgcctgggggccctggccctgagtctgcgctggggcccccaaagcccagccgagctctgatcgttgcagagcatganaagaagcaaaaagctggaaacggacgccatgttccggctggancatggcgaagccgaccgcancacactcaaaaaggcgctgccccacactgancccacattccagnangcccaaancgcctggaaggacnacttcnccctcaanancatgctgcggaaaaaggttccgggaaaaaaaaaaaagcccttccnggaaggaggangaaaaaaaaaccaggncntnnnaggccaaggngaancctgaacnatcccnctgggngcccnaaanngaaaaaanaccccaagctggnggnnctgctnaaanttcncncccctggaactcctncnagganaancaaaaaactnaagngggancnnaaatnttnnnccgnttctgggtttccctnnngncccccggaattcccccncaaaaaaaaggnnnccnggncttcnttaaaaaantggnnaaaaacccnaaaacngnttttcccctnccccnnancnnngggnaannngnnnntnnggggggnnaann

SEQ ID NO: 238 - DNA, 1288 bp, Homo Sapiens
  misc_feature (853)..(853): n is a, c, g, or t
  misc_feature (918)..(918): n is a, c, g, or t
  misc_feature (921)..(921): n is a, c, g, or t
  misc_feature (929)..(929): n is a, c, g, or t
  misc_feature (937)..(937): n is a, c, g, or t
  misc_feature (953)..(953): n is a, c, g, or t
  misc_feature (973)..(974): n is a, c, g, or t
  misc_feature (979)..(979): n is a, c, g, or t
  misc_feature (981)..(981): n is a, c, g, or t
  misc_feature (1001)..(1001): n is a, c, g, or t
  misc_feature (1009)..(1009): n is a, c, g, or t
  misc_feature (1038)..(1038): n is a, c, g, or t
  misc_feature (1053)..(1053): n is a, c, g, or t
  misc_feature (1058)..(1058): n is a, c, g, or t
  misc_feature (1063)..(1063): n is a, c, g, or t
  misc_feature (1066)..(1066): n is a, c, g, or t
  misc_feature (1078)..(1078): n is a, c, g, or t
  misc_feature (1087)..(1089): n is a, c, g, or t
  misc_feature (1101)..(1102): n is a, c, g, or t
  misc_feature (1105)..(1105): n is a, c, g, or t
  misc_feature (1109)..(1109): n is a, c, g, or t
  misc_feature (1111)..(1111): n is a, c, g, or t
  misc_feature (1113)..(1114): n is a, c, g, or t
  misc_feature (1116)..(1116): n is a, c, g, or t
  misc_feature (1121)..(1121): n is a, c, g, or t
  misc_feature (1128)..(1129): n is a, c, g, or t
  misc_feature (1131)..(1131): n is a, c, g, or t
  misc_feature (1135)..(1135): n is a, c, g, or t
  misc_feature (1137)..(1137): n is a, c, g, or t
  misc_feature (1144)..(1144): n is a, c, g, or t
  misc_feature (1152)..(1152): n is a, c, g, or t
  misc_feature (1155)..(1156): n is a, c, g, or t
  misc_feature (1158)..(1158): n is a, c, g, or t
  misc_feature (1160)..(1160): n is a, c, g, or t
  misc_feature (1163)..(1164): n is a, c, g, or t
  misc_feature (1169)..(1170): n is a, c, g, or t
  misc_feature (1173)..(1174): n is a, c, g, or t
  misc_feature (1177)..(1178): n is a, c, g, or t
  misc_feature (1180)..(1180): n is a, c, g, or t
  misc_feature (1182)..(1182): n is a, c, g, or t
  misc_feature (1186)..(1186): n is a, c, g, or t
  misc_feature (1189)..(1189): n is a, c, g, or t
  misc_feature (1191)..(1193): n is a, c, g, or t
  misc_feature (1195)..(1196): n is a, c, g, or t
  misc_feature (1200)..(1200): n is a, c, g, or t
  misc_feature (1208)..(1208): n is a, c, g, or t
  misc_feature (1211)..(1212): n is a, c, g, or t
  misc_feature (1216)..(1216): n is a, c, g, or t
  misc_feature (1218)..(1218): n is a, c, g, or t
  misc_feature (1236)..(1236): n is a, c, g, or t
  misc_feature (1239)..(1239): n is a, c, g, or t
  misc_feature (1246)..(1246): n is a, c, g, or t
  misc_feature (1248)..(1249): n is a, c, g, or t
  misc_feature (1252)..(1254): n is a, c, g, or t
  misc_feature (1257)..(1257): n is a, c, g, or t
  misc_feature (1259)..(1259): n is a, c, g, or t
  misc_feature (1262)..(1262): n is a, c, g, or t
  misc_feature (1264)..(1267): n is a, c, g, or t
  misc_feature (1272)..(1274): n is a, c, g, or t
  misc_feature (1276)..(1277): n is a, c, g, or t
  misc_feature (1279)..(1280): n is a, c, g, or t
  misc_feature (1285)..(1288): n is a, c, g, or t
tagagaaattactatgagaggatcgcatcaccatcaccatcacggatcctatttaggtgacactatagaatcgtcgacccacgcgtccgggggatctggcggtggagcgctaggatcagacgcccccgcgatgaccagctcccccgtctccagagtcgtgtacaacggcaagaggaccagcagcccccgctccccacccagcagcagcgagatcttcaccccagcccacgaggagaacgtccgcttcatttacgaagcctggcagggtgtggagcgagacctgcgaggccaggtgccgggtggcgagcggggcctggtggaggagtatgtggagaaggtccctaaccccagcctgaagaccttcaagcccatcgacctgagtgacctgaagcgccggagcacgcaggatgccaagaagtcctagagcgcccggtgcccctccccggcctccggaagatcagggtgcgaggtgtcggttccctcctgtcctgtggtcctgcccctgggatgggggtgccttgctccagcgggctgcagatcccagcactggcgtgactgacggctgaggcctgcctctccttcccaagcccccttccttcatccttgggggtctcaggctgcccccatcatgggggtctgggccctgcccaccctcctgccctcccccagccacctggctgcatttttgaagctgcctggcccccaggggccctgacctgacctctctcctctcccctcaccctcctgcccctggccactgcaggatcaggaggggagaagaaggagcctctgctgcctcccaggctgctgggactgggctggttttgtccttgaagtggtcaggatacagganaagggcagccccaccccatccagcctgggctccccgcaaaaccttgctgctcccgtggcctgganacnctggggancttctcanacctaccctacgtcancctggcttttcctgaatcannttaananggcaccactctttggcctangaaactgncgggcccccaagggggtcccaacaaccangcctggcctcctggngtttncggtnaantggcccctgggnagggcaccnnnttaacctgaagnntgntgtngntnntnttggnctggggnngntggnangtcacantccttttnttnntngnccnntaaannaannttnntngntttnaantnnngnntttnaaaaaggnggnncctngnaaaaaaaaaaaaaaaaanggnccccccnannggnnnatnanttntnnnnaattnnncnntnnaaaannnn

SEQ ID NO: 239 - DNA, 1388 bp, Homo Sapiens
  misc_feature (725)..(725): n is a, c, g, or t
  misc_feature (888)..(888): n is a, c, g, or t
  misc_feature (895)..(895): n is a, c, g, or t
  misc_feature (906)..(906): n is a, c, g, or t
  misc_feature (915)..(915): n is a, c, g, or t
  misc_feature (935)..(935): n is a, c, g, or t
  misc_feature (958)..(958): n is a, c, g, or t
  misc_feature (962)..(962): n is a, c, g, or t
  misc_feature (964)..(964): n is a, c, g, or t
  misc_feature (972)..(972): n is a, c, g, or t
  misc_feature (995)..(996): n is a, c, g, or t
  misc_feature (999)..(999): n is a, c, g, or t
  misc_feature (1003)..(1003): n is a, c, g, or t
  misc_feature (1005)..(1005): n is a, c, g, or t
  misc_feature (1026)..(1026): n is a, c, g, or t
  misc_feature (1030)..(1030): n is a, c, g, or t
  misc_feature (1036)..(1036): n is a, c, g, or t
  misc_feature (1046)..(1046): n is a, c, g, or t
  misc_feature (1052)..(1052): n is a, c, g, or t
  misc_feature (1054)..(1054): n is a, c, g, or t
  misc_feature (1062)..(1062): n is a, c, g, or t
  misc_feature (1073)..(1073): n is a, c, g, or t
  misc_feature (1075)..(1076): n is a, c, g, or t
  misc_feature (1078)..(1078): n is a, c, g, or t
  misc_feature (1081)..(1081): n is a, c, g, or t
  misc_feature (1087)..(1087): n is a, c, g, or t
  misc_feature (1090)..(1090): n is a, c, g, or t
  misc_feature (1093)..(1094): n is a, c, g, or t
  misc_feature (1097)..(1097): n is a, c, g, or t
  misc_feature (1099)..(1099): n is a, c, g, or t
  misc_feature (1104)..(1104): n is a, c, g, or t
  misc_feature (1106)..(1106): n is a, c, g, or t
  misc_feature (1109)..(1109): n is a, c, g, or t
  misc_feature (1118)..(1118): n is a, c, g, or t
  misc_feature (1124)..(1124): n is a, c, g, or t
  misc_feature (1126)..(1127): n is a, c, g, or t
  misc_feature (1130)..(1130): n is a, c, g, or t
  misc_feature (1149)..(1149): n is a, c, g, or t
  misc_feature (1154)..(1154): n is a, c, g, or t
  misc_feature (1156)..(1156): n is a, c, g, or t
  misc_feature (1161)..(1162): n is a, c, g, or t
  misc_feature (1167)..(1169): n is a, c, g, or t
  misc_feature (1173)..(1175): n is a, c, g, or t
  misc_feature (1177)..(1178): n is a, c, g, or t
  misc_feature (1183)..(1183): n is a, c, g, or t
  misc_feature (1190)..(1191): n is a, c, g, or t
  misc_feature (1203)..(1203): n is a, c, g, or t
  misc_feature (1215)..(1215): n is a, c, g, or t
  misc_feature (1224)..(1225): n is a, c, g, or t
  misc_feature (1233)..(1233): n is a, c, g, or t
  misc_feature (1235)..(1236): n is a, c, g, or t
  misc_feature (1239)..(1240): n is a, c, g, or t
  misc_feature (1245)..(1246): n is a, c, g, or t
  misc_feature (1249)..(1249): n is a, c, g, or t
  misc_feature (1259)..(1260): n is a, c, g, or t
  misc_feature (1262)..(1264): n is a, c, g, or t
  misc_feature (1266)..(1266): n is a, c, g, or t
  misc_feature (1269)..(1269): n is a, c, g, or t
  misc_feature (1271)..(1271): n is a, c, g, or t
  misc_feature (1283)..(1283): n is a, c, g, or t
  misc_feature (1287)..(1287): n is a, c, g, or t
  misc_feature (1292)..(1292): n is a, c, g, or t
  misc_feature (1294)..(1295): n is a, c, g, or t
  misc_feature (1299)..(1299): n is a, c, g, or t
  misc_feature (1303)..(1303): n is a, c, g, or t
  misc_feature (1305)..(1305): n is a, c, g, or t
  misc_feature (1310)..(1310): n is a, c, g, or t
  misc_feature (1316)..(1316): n is a, c, g, or t
  misc_feature (1320)..(1321): n is a, c, g, or t
  misc_feature (1328)..(1328): n is a, c, g, or t
  misc_feature (1332)..(1333): n is a, c, g, or t
  misc_feature (1344)..(1344): n is a, c, g, or t
  misc_feature (1348)..(1350): n is a, c, g, or t
  misc_feature (1354)..(1354): n is a, c, g, or t
  misc_feature (1356)..(1356): n is a, c, g, or t
  misc_feature (1362)..(1362): n is a, c, g, or t
  misc_feature (1371)..(1372): n is a, c, g, or t
  misc_feature (1374)..(1374): n is a, c, g, or t
  misc_feature (1380)..(1380): n is a, c, g, or t
  misc_feature (1385)..(1385): n is a, c, g, or t
  misc_feature (1387)..(1388): n is a, c, g, or t
tagagaaattactatgagaggatcgcatcaccatcaccatcacggatcctatttaggtgacactatagaatcgtcgacccacgcgtccggtgaccaaggcggccatgattgtgaaccagctgtcgaagaaggaggcgtcgcggcgggccctgatgggctcgccccagctggtggccgctgtcgtgcgtaccatgcagaataccagcgacctggacacagcccgctgcaccaccagcatcctgcacaacctctcccaccaccgggaggggctgctcgccatcttcaagtcgggtggcatccctgctctggtccgcatgctcagctcccctgtggagtcggtcctgttctatgccatcaccacgctgcacaacctgctcctgtaccaggagggcgccaagatggccgtgcgcctggccgacgggctgcaaaagatggtgcccctgctcaacaagaacaaccccaagttcctggccatcaccaccgactgcctgcagctcctggcctacggcaaccaggagagcaagctgatcatcctggccaatggtgggccccaggccctcgtgcagatcatgcgtaactacagttatgaaaagctgctctggaccaccagtcgtgtgctcaaggtgctatccgtgtgtcccagcaataagcctgccattgtggaggctggtgggatgcaggccctgggcaagcacctgaccagcaacagcccccgcctggtgcanaactgcctgtggaccctgcgcaacctctcagatgtggccaccaagcaggagggcctggagagtgtgctgaaaattctggtgaatcagctgagtgtggatgacgtcaacgtccctcacctgtgccacgggcacactctccaacctgacatgcaacaacagcaanaacaaanacgctggtganacaaaaaancggtgtggaggctcttatcnatgccatcctgcgtggtggtganaagnanaaattcanggaacctgccgtttgcgctttgnnccncttnantaaccgccaaccttgaggccnaaantggccnaaaaattttntgcgtntnaatttggnattccaacccntnngnaantttttnaancannccnancaatngnccnttggtcaangaaacntnncgntttaataaagaaatttggnccttntnccaannaaaannncccnnntnnagaangaaggtnnaccccccccttntcaatttttggnaaagccccnnaaattccnannccnntattnnggncaaaaaaccnnannnanggngnagaaagaaaaanttgnggttncnnaaanttantnccccngaaccnaaannaaggaanttcnncacaccctccntttnnncccnancccggnaaaaaaacnngntcgggnttttntnn

SEQ ID NO: 240 - DNA, 1200 bp, Homo Sapiens
  misc_feature (852)..(852): n is a, c, g, or t
  misc_feature (855)..(855): n is a, c, g, or t
  misc_feature (885)..(885): n is a, c, g, or t
  misc_feature (899)..(899): n is a, c, g, or t
  misc_feature (941)..(941): n is a, c, g, or t
  misc_feature (943)..(943): n is a, c, g, or t
  misc_feature (950)..(950): n is a, c, g, or t
  misc_feature (958)..(958): n is a, c, g, or t
  misc_feature (964)..(964): n is a, c, g, or t
  misc_feature (966)..(966): n is a, c, g, or t
  misc_feature (969)..(969): n is a, c, g, or t
  misc_feature (972)..(972): n is a, c, g, or t
  misc_feature (974)..(974): n is a, c, g, or t
  misc_feature (993)..(993): n is a, c, g, or t
  misc_feature (997)..(997): n is a, c, g, or t
  misc_feature (1002)..(1002): n is a, c, g, or t
  misc_feature (1007)..(1007): n is a, c, g, or t
  misc_feature (1010)..(1010): n is a, c, g, or t
  misc_feature (1013)..(1013): n is a, c, g, or t
  misc_feature (1015)..(1015): n is a, c, g, or t
  misc_feature (1026)..(1026): n is a, c, g, or t
  misc_feature (1033)..(1033): n is a, c, g, or t
  misc_feature (1047)..(1047): n is a, c, g, or t
  misc_feature (1058)..(1058): n is a, c, g, or t
  misc_feature (1061)..(1061): n is a, c, g, or t
  misc_feature (1070)..(1070): n is a, c, g, or t
  misc_feature (1073)..(1073): n is a, c, g, or t
  misc_feature (1076)..(1076): n is a, c, g, or t
  misc_feature (1081)..(1081): n is a, c, g, or t
  misc_feature (1084)..(1084): n is a, c, g, or t
  misc_feature (1089)..(1089): n is a, c, g, or t
  misc_feature (1091)..(1091): n is a, c, g, or t
  misc_feature (1097)..(1098): n is a, c, g, or t
  misc_feature (1113)..(1113): n is a, c, g, or t
  misc_feature (1117)..(1117): n is a, c, g, or t
  misc_feature (1121)..(1121): n is a, c, g, or t
  misc_feature (1132)..(1132): n is a, c, g, or t
  misc_feature (1135)..(1135): n is a, c, g, or t
  misc_feature (1147)..(1147): n is a, c, g, or t
  misc_feature (1153)..(1153): n is a, c, g, or t
  misc_feature (1156)..(1160): n is a, c, g, or t
  misc_feature (1167)..(1167): n is a, c, g, or t
  misc_feature (1170)..(1170): n is a, c, g, or t
  misc_feature (1172)..(1172): n is a, c, g, or t
  misc_feature (1174)..(1174): n is a, c, g, or t
  misc_feature (1179)..(1179): n is a, c, g, or t
  misc_feature (1187)..(1187): n is a, c, g, or t
  misc_feature (1189)..(1190): n is a, c, g, or t
  misc_feature (1196)..(1197): n is a, c, g, or t
agagagaattactatgagaggatcgcatcaccatcaccatcacggatcctatttaggtgacactatagaatcgtcgacccacgcgtccgagagccgccagcgcgtgcgctacgactcctccaaccaggtcaagggcaagcccgacctgaacacggcgctgcccgtgcgccagacggcgtccatcttcaagcagccggtgaccaagattaccaaccaccccagcaacaaggtcaagagcgacccgcagaaggcggtggaccagccgcgccagctcttctgggagaagaagctgagcggcctgaacgccttcgacattgctgaggagctggtcaagaccatggacctccccaagggcctgcagggggtgggacctggctgcacggatgagacgctgctgtcggccatcgccagcgccctgcacactagcaccatgcccatcacgggacagctctcggccgccgtggagaagaaccccggcgtatggctcaacaccacgcagcccctgtgcaaagccttcatggtgaccgacgaggacatcaggaagcaggaagagctggtgcagcaggtgcggaagcggctggaggaggcgctgatggccgacatgctggcgcacgtggaggagctggcccgtgacggggaggcgccgctggacaaggcctgcgctgaggacgacgacgaggaagacgaggaggaggaggaggaggagcccgacccggacccggagatggagcacgtctagggcagaggccctgccgagagcccgtgctgcctgctggagccgcctgcagacgcggtcctcggccccacgtgaaccaggctcggcggcgaagcccagccttggagacacccagnagnaaggccgtgctcctggcttccttcctcggnccgtcccacttccnggggcctcggggcacacagctggggctgcccccacccgaaanancctccangctcgtcntctaanantcnggntncggaaatgccgggtgctcntggncctgnctggntcntananctttgggctcnaggccantcctcccatgcccnttttccacttnttnaaatggaanaancanaaggnccnggaantnggcccnngtttgttaaaattgnaagntttntggtttgaggntanttttaaattcantccccntgnnnnngggagangantntnttttnttgggggnannaaaagnnccc

SEQ ID NO: 241 - DNA, 1345 bp, Homo Sapiens
  misc_feature (3)..(3): n is a, c, g, or t
  misc_feature (858)..(858): n is a, c, g, or t
  misc_feature (867)..(867): n is a, c, g, or t
  misc_feature (909)..(909): n is a, c, g, or t
  misc_feature (940)..(940): n is a, c, g, or t
  misc_feature (943)..(943): n is a, c, g, or t
  misc_feature (945)..(945): n is a, c, g, or t
  misc_feature (949)..(950): n is a, c, g, or t
  misc_feature (956)..(956): n is a, c, g, or t
  misc_feature (968)..(968): n is a, c, g, or t
  misc_feature (974)..(974): n is a, c, g, or t
  misc_feature (1000)..(1000): n is a, c, g, or t
  misc_feature (1008)..(1008): n is a, c, g, or t
  misc_feature (1018)..(1018): n is a, c, g, or t
  misc_feature (1029)..(1029): n is a, c, g, or t
  misc_feature (1045)..(1045): n is a, c, g, or t
  misc_feature (1050)..(1051): n is a, c, g, or t
  misc_feature (1056)..(1059): n is a, c, g, or t
  misc_feature (1063)..(1063): n is a, c, g, or t
  misc_feature (1066)..(1066): n is a, c, g, or t
  misc_feature (1073)..(1074): n is a, c, g, or t
  misc_feature (1077)..(1077): n is a, c, g, or t
  misc_feature (1079)..(1079): n is a, c, g, or t
  misc_feature (1083)..(1083): n is a, c, g, or t
  misc_feature (1091)..(1093): n is a, c, g, or t
  misc_feature (1101)..(1101): n is a, c, g, or t
  misc_feature (1110)..(1110): n is a, c, g, or t
  misc_feature (1112)..(1112): n is a, c, g, or t
  misc_feature (1115)..(1115): n is a, c, g, or t
  misc_feature (1123)..(1123): n is a, c, g, or t
  misc_feature (1129)..(1130): n is a, c, g, or t
  misc_feature (1132)..(1132): n is a, c, g, or t
  misc_feature (1136)..(1136): n is a, c, g, or t
  misc_feature (1142)..(1143): n is a, c, g, or t
  misc_feature (1161)..(1161): n is a, c, g, or t
  misc_feature (1163)..(1163): n is a, c, g, or t
  misc_feature (1170)..(1170): n is a, c, g, or t
  misc_feature (1176)..(1176): n is a, c, g, or t
  misc_feature (1178)..(1178): n is a, c, g, or t
  misc_feature (1182)..(1182): n is a, c, g, or t
  misc_feature (1184)..(1184): n is a, c, g, or t
  misc_feature (1187)..(1187): n is a, c, g, or t
  misc_feature (1189)..(1189): n is a, c, g, or t
  misc_feature (1191)..(1191): n is a, c, g, or t
  misc_feature (1194)..(1194): n is a, c, g, or t
  misc_feature (1205)..(1206): n is a, c, g, or t
  misc_feature (1208)..(1208): n is a, c, g, or t
  misc_feature (1212)..(1212): n is a, c, g, or t
  misc_feature (1217)..(1217): n is a, c, g, or t
  misc_feature (1227)..(1227): n is a, c, g, or t
  misc_feature (1230)..(1230): n is a, c, g, or t
  misc_feature (1233)..(1233): n is a, c, g, or t
  misc_feature (1235)..(1235): n is a, c, g, or t
  misc_feature (1238)..(1240): n is a, c, g, or t
  misc_feature (1242)..(1242): n is a, c, g, or t
  misc_feature (1244)..(1245): n is a, c, g, or t
  misc_feature (1248)..(1249): n is a, c, g, or t
  misc_feature (1256)..(1256): n is a, c, g, or t
  misc_feature (1259)..(1259): n is a, c, g, or t
  misc_feature (1261)..(1264): n is a, c, g, or t
  misc_feature (1272)..(1272): n is a, c, g, or t
  misc_feature (1275)..(1276): n is a, c, g, or t
  misc_feature (1278)..(1279): n is a, c, g, or t
  misc_feature (1282)..(1283): n is a, c, g, or t
  misc_feature (1286)..(1288): n is a, c, g, or t
  misc_feature (1295)..(1295): n is a, c, g, or t
  misc_feature (1298)..(1300): n is a, c, g, or t
  misc_feature (1304)..(1304): n is a, c, g, or t
  misc_feature (1308)..(1311): n is a, c, g, or t
  misc_feature (1315)..(1316): n is a, c, g, or t
  misc_feature (1318)..(1318): n is a, c, g, or t
  misc_feature (1321)..(1321): n is a, c, g, or t
  misc_feature (1323)..(1325): n is a, c, g, or t
  misc_feature (1327)..(1327): n is a, c, g, or t
  misc_feature (1331)..(1334): n is a, c, g, or t
  misc_feature (1337)..(1337): n is a, c, g, or t
  misc_feature (1339)..(1345): n is a, c, g, or t
atngaggaaattactatgagaggatcgcatcaccatcaccatcacggatcctatttaggtgacactatagaatcgtcgacccacgcgtccgcagagccttcccactgtggacacctcggcccaggcggcccctcagacctacgccgaatatgccatctcacagcctctggaaggggctggggccacgtgccccacagggtcagagcccctggcaggagagacgcccaaccaggccctgaaacccggggcaaaatccaacagcatcattgtgagccctcggcagaggggcaatcccgtactgaagttcgtgcgcaacgtgccctgggaatttggcgacgtaattcccgactatgtgctgggccagagcacctgtgccctgttcctcagcctccgctaccacaacctgcacccagactacatccatgggcggctgcagagcctggggaagaacttcgccttgcgggtcctgcttgtccaggtggatgtgaaagatccccagcaggccctcaaggagctggctaagatgtgtatcctggccgactgcacattgatcctcgcctggagccccgaggaagctgggcggtacctggagacctacaaggcctatgagcagaaaccagcggacctcctgatggagaagctagagcaggacttcgtctcccggtctctggaacagctcatcgccgcatcaagagaagatctggccttatgcccaggcctgggccctcagaaagcccggaggctgtttgatgtcctgcacgagcccttcttgaaagtaccctgatgaccccagctgccaaggaaacccccagtgtaataataaatcgtcctcccaggccagggctcctgctggctgcnctggtgcantctctgggggaggggattctgggggtgtcaccttctggtggncccaggtggggcaccttcagcttttctttanttncntcanntttccnggggggcaaaantaaaanagggctggctgctggctgctttcttnccgctttnttgtcccggncttgtgggaancctcctcccccaaaanttttnnaattnnnntggnggnccttggnnttntncttnttgggggnnnttgttttntggggaatncnggntttttccngaaacnngntttntttccnntttttggggggaatcccngnaaatttnccctgngntttncnggntntnccntccccctgggnnantttnagggntttaaggggnttnaantnggnnncnannccnnggggggnaancnnnncccttttnttnntnnttnnttnnnggggggnaannngggnaaannnncccnnanagncnnnanggtnnnnccngnnnnnnn

SEQ ID NO: 242 - DNA, 1188 bp, Homo Sapiens
  misc_feature (866)..(866): n is a, c, g, or t
  misc_feature (924)..(924): n is a, c, g, or t
  misc_feature (935)..(935): n is a, c, g, or t
  misc_feature (937)..(937): n is a, c, g, or t
  misc_feature (951)..(951): n is a, c, g, or t
  misc_feature (963)..(963): n is a, c, g, or t
  misc_feature (981)..(981): n is a, c, g, or t
  misc_feature (991)..(991): n is a, c, g, or t
  misc_feature (1000)..(1000): n is a, c, g, or t
  misc_feature (1003)..(1003): n is a, c, g, or t
  misc_feature (1005)..(1005): n is a, c, g, or t
  misc_feature (1030)..(1030): n is a, c, g, or t
  misc_feature (1050)..(1050): n is a, c, g, or t
  misc_feature (1052)..(1052): n is a, c, g, or t
  misc_feature (1065)..(1065): n is a, c, g, or t
  misc_feature (1078)..(1078): n is a, c, g, or t
  misc_feature (1083)..(1083): n is a, c, g, or t
  misc_feature (1105)..(1105): n is a, c, g, or t
  misc_feature (1122)..(1122): n is a, c, g, or t
  misc_feature (1124)..(1124): n is a, c, g, or t
  misc_feature (1127)..(1127): n is a, c, g, or t
  misc_feature (1141)..(1141): n is a, c, g, or t
  misc_feature (1143)..(1143): n is a, c, g, or t
  misc_feature (1148)..(1148): n is a, c, g, or t
  misc_feature (1155)..(1155): n is a, c, g, or t
  misc_feature (1158)..(1158): n is a, c, g, or t
  misc_feature (1166)..(1166): n is a, c, g, or t
  misc_feature (1168)..(1168): n is a, c, g, or t
  misc_feature (1178)..(1178): n is a, c, g, or t
agagaaattactatgagaggatcgcatcaccatcaccatcacggatcctatttaggtgacactatagaatcgtcgacccacgcgtccgggagaaggtctctgaaggagaaaagcaaagaagctcttttggcctcacaaaagccatttaaatttatagcaagggaggaacagaagcgagcagcccgggaaaagcagctgagagactttcttaagtataaaaagaaaacaaatcgatttaaagccagacccattcctcgatctacttatggttcaactaccaatgacaagttaaaagaagaagagctctatcgaaaccttaggacacagctgagagcccaggagcatttacagaactcatctcctctgccttgtaggtcagcttgcggatgcaggaaccccaggtgtcctgaacaggctgtaaagttgaagtgtaaacacaaggttaggtgcccaactcctgattttgaggaccttcctgagagataccagaaacacctctcagaacacaagtctccaaaactcttaacagtgtgtaaaccatttgatcttcatgcatctccacatgcatctattaaaaaaaaaaaaaaagggcggccgctccctatagtgagtcgtattaagcttaattagctgagcttggactcctgttgatagatccagtaatgacctcagaactccatctggatttgttcagaacgctcggttgccgccgggcgttttttattggtgagaatccaagctagcttggcgagattttcaggagctaaggaagctaaaatggagaaaaaaatcactggatataccaccgttgatatatcccaatggcatcgtaaagaacattttgaggcatttcagtcagttgctcnatgtacctataaccagaccgttcagctggatattacggcctttttaagaccgtaaaanaaaaataagcncnaagttttatccggncctttattcccntttcttgcccgcctgaangaatggctcntcccggaanttncntaagggcaatggaaaaaccggggancctggggaaatggggaaaangnttccccccttgtnaccccgtttttcntggancaaactgaaaccgttttcctcnccccggggagggaaaancnccnacaaattttccggncngtttnctaaccnatnttttcccnanaagggggggnggttaccggg

SEQ ID NO: 243 - DNA, 1412 bp, Homo Sapiens
  misc_feature (901)..(901): n is a, c, g, or t
  misc_feature (938)..(938): n is a, c, g, or t
  misc_feature (948)..(948): n is a, c, g, or t
  misc_feature (950)..(950): n is a, c, g, or t
  misc_feature (959)..(959): n is a, c, g, or t
  misc_feature (986)..(987): n is a, c, g, or t
  misc_feature (1003)..(1003): n is a, c, g, or t
  misc_feature (1012)..(1012): n is a, c, g, or t
  misc_feature (1014)..(1014): n is a, c, g, or t
  misc_feature (1022)..(1022): n is a, c, g, or t
  misc_feature (1029)..(1029): n is a, c, g, or t
  misc_feature (1037)..(1040): n is a, c, g, or t
  misc_feature (1048)..(1048): n is a, c, g, or t
  misc_feature (1061)..(1061): n is a, c, g, or t
  misc_feature (1081)..(1082): n is a, c, g, or t
  misc_feature (1094)..(1097): n is a, c, g, or t
  misc_feature (1105)..(1105): n is a, c, g, or t
  misc_feature (1108)..(1109): n is a, c, g, or t
  misc_feature (1118)..(1118): n is a, c, g, or t
  misc_feature (1123)..(1124): n is a, c, g, or t
  misc_feature (1128)..(1128): n is a, c, g, or t
  misc_feature (1132)..(1133): n is a, c, g, or t
  misc_feature (1137)..(1138): n is a, c, g, or t
  misc_feature (1160)..(1160): n is a, c, g, or t
  misc_feature (1164)..(1164): n is a, c, g, or t
  misc_feature (1173)..(1173): n is a, c, g, or t
  misc_feature (1175)..(1175): n is a, c, g, or t
  misc_feature (1178)..(1178): n is a, c, g, or t
  misc_feature (1185)..(1185): n is a, c, g, or t
  misc_feature (1188)..(1188): n is a, c, g, or t
  misc_feature (1191)..(1192): n is a, c, g, or t
  misc_feature (1194)..(1194): n is a, c, g, or t
  misc_feature (1196)..(1197): n is a, c, g, or t
  misc_feature (1201)..(1202): n is a, c, g, or t
  misc_feature (1206)..(1206): n is a, c, g, or t
  misc_feature (1208)..(1208): n is a, c, g, or t
  misc_feature (1221)..(1221): n is a, c, g, or t
  misc_feature (1236)..(1236): n is a, c, g, or t
  misc_feature (1239)..(1240): n is a, c, g, or t
  misc_feature (1242)..(1242): n is a, c, g, or t
  misc_feature (1244)..(1244): n is a, c, g, or t
  misc_feature (1252)..(1252): n is a, c, g, or t
  misc_feature (1265)..(1267): n is a, c, g, or t
  misc_feature (1273)..(1273): n is a, c, g, or t
  misc_feature (1278)..(1279): n is a, c, g, or t
  misc_feature (1281)..(1281): n is a, c, g, or t
  misc_feature (1295)..(1295): n is a, c, g, or t
  misc_feature (1299)..(1300): n is a, c, g, or t
  misc_feature (1305)..(1305): n is a, c, g, or t
  misc_feature (1310)..(1310): n is a, c, g, or t
  misc_feature (1315)..(1316): n is a, c, g, or t
  misc_feature (1331)..(1331): n is a, c, g, or t
  misc_feature (1334)..(1334): n is a, c, g, or t
  misc_feature (1337)..(1337): n is a, c, g, or t
  misc_feature (1343)..(1343): n is a, c, g, or t
  misc_feature (1345)..(1345): n is a, c, g, or t
  misc_feature (1350)..(1351): n is a, c, g, or t
  misc_feature (1356)..(1356): n is a, c, g, or t
  misc_feature (1358)..(1358): n is a, c, g, or t
  misc_feature (1362)..(1362): n is a, c, g, or t
  misc_feature (1369)..(1369): n is a, c, g, or t
  misc_feature (1376)..(1376): n is a, c, g, or t
  misc_feature (1383)..(1383): n is a, c, g, or t
  misc_feature (1390)..(1390): n is a, c, g, or t
  misc_feature (1392)..(1392): n is a, c, g, or t
  misc_feature (1397)..(1397): n is a, c, g, or t
  misc_feature (1403)..(1405): n is a, c, g, or t
attagagagattactatgagaggatcgcatcaccatcaccatcacggatcctatttaggtgacactatagaatcgtcgacccacgcgtccggtcctcttcatgcgcagcgacgactcgcgggagctcattgcagccgccagccgcgccaatgcctccttcacctgggtggccagcgacggctggggcgcgcaggagagcatcatcaagggcagcgagcatgtggcctacggcgccatcaccctggagctggcctcccagcctgtccgccagttcgaccgctacttccagagcctcaacccctacaacaaccaccgcaacccctggttccgggacttctgggagcaaaagtttcagtgcagcctccagaacaaacgcaaccacaggcgcgtctgcgacaagcacctggccatcgacagcagcaactacgagcaagagtccaagatcatgtttgtggtgaacgcggtgtatgccatggcccacgctttgcacaaaatgcagcgcaccctctgtcccaacactaccaagctttgtgatgctatgaagatcctggatgggaagaagttgtacaaggattacttgctgaaaatcaacttcacggctccattcaacccaaataaagatgcagatagcatagtcaagtttgacacttttggagatggaatggggcgatacaacgtgttcaatttccaaaatgtaggtggaaagtattcctacttgaaagttggtcactgggcagaaaccttatcgctagatgtcaactctatccactggtcccggaactcagtccccacttcccagtgcagcgacccctgtgcccccaatgaaatgaagaatatgcaaccaggggatgtctgctgctggatttgcatcccctgtgaaccctacgaatacctggctgangagtttacctgtatggattgtgggtctggacagtggncccactgcanancttaactgnatgctaatgacctttcctgaagaactnnatcaggtgggaaaaangcctgggcnantggcccantcaccanttgcctgnnnngggttttnatgggtaaatgcntgggtggaaatgttttttannaagccaaaaaannnnccttggtnaannttcgggccnaaaannctgntaanntttnnttttttggggtgggcctgtaanatgnagaaatttntnttnttgcaanccntcnnantnntttnntttngncccaaattcggtngggaattccttcctnttnntntncaccctgngaaaaaaaaaatnnntgcccnctttnnanggttaaaagggccnaaannatttnccccntttcnnttttttttcggggtnaantgnaaattnangggtnngggtntntggnccccccnaaatttnttaaaangaaaccncnaaagngaaaannngtttttt

SEQ ID NO: 244 - DNA, 1200 bp, Homo Sapiens
  misc_feature (4)..(4): n is a, c, g, or t
  misc_feature (13)..(13): n is a, c, g, or t
  misc_feature (37)..(37): n is a, c, g, or t
  misc_feature (49)..(49): n is a, c, g, or t
  misc_feature (69)..(69): n is a, c, g, or t
  misc_feature (450)..(450): n is a, c, g, or t
  misc_feature (539)..(539): n is a, c, g, or t
  misc_feature (575)..(575): n is a, c, g, or t
  misc_feature (631)..(632): n is a, c, g, or t
  misc_feature (694)..(695): n is a, c, g, or t
  misc_feature (702)..(702): n is a, c, g, or t
  misc_feature (713)..(713): n is a, c, g, or t
  misc_feature (753)..(753): n is a, c, g, or t
  misc_feature (762)..(762): n is a, c, g, or t
  misc_feature (771)..(771): n is a, c, g, or t
  misc_feature (780)..(780): n is a, c, g, or t
  misc_feature (797)..(797): n is a, c, g, or t
  misc_feature (801)..(801): n is a, c, g, or t
  misc_feature (804)..(804): n is a, c, g, or t
  misc_feature (811)..(811): n is a, c, g, or t
  misc_feature (813)..(813): n is a, c, g, or t
  misc_feature (819)..(819): n is a, c, g, or t
  misc_feature (829)..(829): n is a, c, g, or t
  misc_feature (834)..(834): n is a, c, g, or t
  misc_feature (840)..(840): n is a, c, g, or t
  misc_feature (848)..(849): n is a, c, g, or t
  misc_feature (851)..(851): n is a, c, g, or t
  misc_feature (858)..(858): n is a, c, g, or t
  misc_feature (875)..(875): n is a, c, g, or t
  misc_feature (881)..(881): n is a, c, g, or t
  misc_feature (883)..(883): n is a, c, g, or t
  misc_feature (888)..(888): n is a, c, g, or t
  misc_feature (891)..(892): n is a, c, g, or t
  misc_feature (895)..(895): n is a, c, g, or t
  misc_feature (897)..(897): n is a, c, g, or t
  misc_feature (904)..(904): n is a, c, g, or t
  misc_feature (915)..(915): n is a, c, g, or t
  misc_feature (921)..(921): n is a, c, g, or t
  misc_feature (928)..(928): n is a, c, g, or t
  misc_feature (935)..(935): n is a, c, g, or t
  misc_feature (938)..(938): n is a, c, g, or t
  misc_feature (947)..(947): n is a, c, g, or t
  misc_feature (950)..(950): n is a, c, g, or t
  misc_feature (960)..(960): n is a, c, g, or t
  misc_feature (974)..(974): n is a, c, g, or t
  misc_feature (977)..(977): n is a, c, g, or t
  misc_feature (984)..(984): n is a, c, g, or t
  misc_feature (991)..(991): n is a, c, g, or t
  misc_feature (996)..(996): n is a, c, g, or t
  misc_feature (1000)..(1001): n is a, c, g, or t
  misc_feature (1006)..(1006): n is a, c, g, or t
  misc_feature (1027)..(1027): n is a, c, g, or t
  misc_feature (1030)..(1030): n is a, c, g, or t
  misc_feature (1033)..(1033): n is a, c, g, or t
  misc_feature (1039)..(1039): n is a, c, g, or t
  misc_feature (1050)..(1050): n is a, c, g, or t
  misc_feature (1052)..(1052): n is a, c, g, or t
  misc_feature (1055)..(1055): n is a, c, g, or t
  misc_feature (1059)..(1059): n is a, c, g, or t
  misc_feature (1062)..(1062): n is a, c, g, or t
  misc_feature (1066)..(1068): n is a, c, g, or t
  misc_feature (1071)..(1071): n is a, c, g, or t
  misc_feature (1073)..(1075): n is a, c, g, or t
  misc_feature (1082)..(1082): n is a, c, g, or t
  misc_feature (1086)..(1086): n is a, c, g, or t
  misc_feature (1088)..(1090): n is a, c, g, or t
  misc_feature (1100)..(1100): n is a, c, g, or t
  misc_feature (1104)..(1106): n is a, c, g, or t
  misc_feature (1113)..(1113): n is a, c, g, or t
  misc_feature (1116)..(1116): n is a, c, g, or t
  misc_feature (1119)..(1119): n is a, c, g, or t
  misc_feature (1121)..(1121): n is a, c, g, or t
  misc_feature (1136)..(1138): n is a, c, g, or t
  misc_feature (1141)..(1141): n is a, c, g, or t
  misc_feature (1143)..(1145): n is a, c, g, or t
  misc_feature (1153)..(1155): n is a, c, g, or t
  misc_feature (1161)..(1161): n is a, c, g, or t
  misc_feature (1164)..(1164): n is a, c, g, or t
  misc_feature (1167)..(1167): n is a, c, g, or t
  misc_feature (1171)..(1171): n is a, c, g, or t
  misc_feature (1174)..(1174): n is a, c, g, or t
  misc_feature (1176)..(1177): n is a, c, g, or t
  misc_feature (1182)..(1182): n is a, c, g, or t
  misc_feature (1184)..(1184): n is a, c, g, or t
  misc_feature (1188)..(1190): n is a, c, g, or t
  misc_feature (1194)..(1194): n is a, c, g, or t
  misc_feature (1197)..(1197): n is a, c, g, or t
  misc_feature (1199)..(1199): n is a, c, g, or t
atanagaaattantatgagaggatcgcatcaccctcnccatcacggatnctattttggtgacactatanaatcgtcgaaccacgcggtccggcctctacacaagtatcccgtgtggctctggaagcggctgcagctgcgggagggcatctgttcccgcctgcccggccactacctgcgctccctggaggaggagcggacgcccactcccgtgcactataggcctcatggggccaagttcaagatcaaccccaagaacgggcagcgggagcgtgtggaggacgtgcccattcccatctactttccccccgaatcccagcgggggttgtggggcggcgagggctggatcctgggccaaatatatgccaacaacgacaagctctccaagaggctgaagaaagtgtggaagccacagctgtttgagcgagagttctacagtgagatcctggacnagaagttcacagtgactgtgaccatgcggaccctggacctcatcgatgaggcttacgggctcgacttttacatcctcaagaccccgaangaggacctgtgctccaagtttgggatggacctgaancgagggatgctgctgcggcttgcccggcaggacccccagctgcaccccgaggaccnngagcggcgggcagccatctacgacaagtacaaggaaatttgccatcccaaaaggacgaaggnnatattgngtggggcctcncgctggaagtaggtccattgagaaaccatagactttttgnaaggataangaccctgtncccctgttnaaagaatctatgtgggngganctnaatccancnatttgncagccatcanggtantggtcnaaaccggnngnggtgccnaaaaagaaaccattggncaagtnancactnagnntcntncatggcntgaaccaaaanggcccnacttttncctggcnaancccctttgnttngaagaaaacnagatcccggggaanctnttaaagnccccccntgggnccanngggtngaaacctgattctcctgttgntgnccnattccncctttacaaancnggngtcnaanttgnnnagngnnnccctcangaangnnngggccccccnaaannncctctcnaanatngngcctcaaaatttttnnngtnannnttcttttnnnccttgnggnccngaanaanannaaatntngtcnnngccnatntna

SEQ ID NO: 245 - DNA, 1412 bp, Homo Sapiens
  misc_feature (827)..(827): n is a, c, g, or t
  misc_feature (841)..(841): n is a, c, g, or t
  misc_feature (854)..(854): n is a, c, g, or t
  misc_feature (895)..(895): n is a, c, g, or t
  misc_feature (949)..(949): n is a, c, g, or t
  misc_feature (955)..(955): n is a, c, g, or t
  misc_feature (960)..(960): n is a, c, g, or t
  misc_feature (971)..(971): n is a, c, g, or t
  misc_feature (979)..(979): n is a, c, g, or t
  misc_feature (990)..(990): n is a, c, g, or t
  misc_feature (1015)..(1015): n is a, c, g, or t
  misc_feature (1033)..(1033): n is a, c, g, or t
  misc_feature (1038)..(1038): n is a, c, g, or t
  misc_feature (1050)..(1050): n is a, c, g, or t
  misc_feature (1054)..(1054): n is a, c, g, or t
  misc_feature (1060)..(1060): n is a, c, g, or t
  misc_feature (1063)..(1063): n is a, c, g, or t
  misc_feature (1072)..(1072): n is a, c, g, or t
  misc_feature (1075)..(1075): n is a, c, g, or t
  misc_feature (1085)..(1085): n is a, c, g, or t
  misc_feature (1090)..(1090): n is a, c, g, or t
  misc_feature (1095)..(1095): n is a, c, g, or t
  misc_feature (1109)..(1109): n is a, c, g, or t
  misc_feature (1112)..(1112): n is a, c, g, or t
  misc_feature (1122)..(1122): n is a, c, g, or t
  misc_feature (1125)..(1125): n is a, c, g, or t
  misc_feature (1127)..(1127): n is a, c, g, or t
  misc_feature (1130)..(1131): n is a, c, g, or t
  misc_feature (1135)..(1135): n is a, c, g, or t
  misc_feature (1141)..(1142): n is a, c, g, or t
  misc_feature (1151)..(1151): n is a, c, g, or t
  misc_feature (1153)..(1153): n is a, c, g, or t
  misc_feature (1158)..(1158): n is a, c, g, or t
  misc_feature (1160)..(1160): n is a, c, g, or t
  misc_feature (1164)..(1164): n is a, c, g, or t
  misc_feature (1166)..(1166): n is a, c, g, or t
  misc_feature (1171)..(1171): n is a, c, g, or t
  misc_feature (1176)..(1176): n is a, c, g, or t
  misc_feature (1178)..(1179): n is a, c, g, or t
  misc_feature (1184)..(1184): n is a, c, g, or t
  misc_feature (1186)..(1186): n is a, c, g, or t
  misc_feature (1188)..(1189): n is a, c, g, or t
  misc_feature (1205)..(1205): n is a, c, g, or t
  misc_feature (1209)..(1211): n is a, c, g, or t
  misc_feature (1224)..(1225): n is a, c, g, or t
  misc_feature (1238)..(1238): n is a, c, g, or t
  misc_feature (1245)..(1245): n is a, c, g, or t
  misc_feature (1251)..(1251): n is a, c, g, or t
  misc_feature (1254)..(1254): n is a, c, g, or t
  misc_feature (1263)..(1263): n is a, c, g, or t
  misc_feature (1265)..(1265): n is a, c, g, or t
  misc_feature (1267)..(1267): n is a, c, g, or t
  misc_feature (1272)..(1272): n is a, c, g, or t
  misc_feature (1274)..(1277): n is a, c, g, or t
  misc_feature (1282)..(1282): n is a, c, g, or t
  misc_feature (1286)..(1287): n is a, c, g, or t
  misc_feature (1294)..(1294): n is a, c, g, or t
  misc_feature (1301)..(1301): n is a, c, g, or t
  misc_feature (1305)..(1305): n is a, c, g, or t
  misc_feature (1309)..(1309): n is a, c, g, or t
  misc_feature (1311)..(1312): n is a, c, g, or t
  misc_feature (1316)..(1316): n is a, c, g, or t
  misc_feature (1318)..(1319): n is a, c, g, or t
  misc_feature (1322)..(1324): n is a, c, g, or t
  misc_feature (1327)..(1327): n is a, c, g, or t
  misc_feature (1330)..(1331): n is a, c, g, or t
  misc_feature (1341)..(1341): n is a, c, g, or t
  misc_feature (1346)..(1347): n is a, c, g, or t
  misc_feature (1349)..(1353): n is a, c, g, or t
  misc_feature (1356)..(1357): n is a, c, g, or t
  misc_feature (1368)..(1379): n is a, c, g, or t
  misc_feature (1381)..(1391): n is a, c, g, or t
  misc_feature (1393)..(1394): n is a, c, g, or t
  misc_feature (1400)..(1403): n is a, c, g, or t
tagagaaattactatgagaggatcgcatcaccatcaccatcacggatcctatttaggtgacactatagaatcgtcgacccacgcgtccgaccaggctcctggtggcacacgtaagtgcaccttgcgaggcagtgagtgcaccgtcgtgctgccgcccgaggcagtgctcctgccgtccgacagttgcatcatcactttccaaatgcgtgtctgggagggagcaggtcagcctggtggacccggagtacctgccctggagacacgtgaagctggacccactctgacttgcagggcaacatcagctctagccactgcatcctgacctggagcatcggtcctgccttggagtcgaggaccacacttctcagctatgacctatggccttccagaggcaggaagaggcctgggaggtgacacaaacctccaaggcccatcacaaggtccttcagcaggtgacacaaacctccaaggcccatcacaaggtccttcagcagatgacacaaacctccaaggcccatcacaaggtccttcagcagatgacacaaacctccaaggctcatcacaaaccttccactttggcccagggcactaaagggcgcacctttgccaggtgggtttggggggagcctcctggcactgaggctgctcacagccctgggcccttcctgcccacgggccctctgatcccaccctgggggtggccaggcaacacccttgttgctgtgtccatctttctcctgctgactggcccgacctacctcctgttcaagctgtcgcccaggtaggtggctgatgtgtgcgtgtgtgtacatgtgtgagcgggcaanagtgtgcatgttantgtatgtgtgcanatgtgtgactgtgtgcatgtgtgaatgtgtggtgggtgggnccgtcaagggccgcccttgtctggttcctcccctcccctctccactgcctgganctgganggggnggggcttttcnagtctccnccctggtccanaaaaagggttctcaacttgccaggnaaaaccagggaagggggntcttnaagcaaaagctnaaanaaaggnacnttggttccnacnaaacccaaantcccnaaaanaaaaccggaggtcntantccctgcccntgnanaanntggnttgttnnttttttccncnttaantnaaangncattngggcntnnggggnanannacccttttccccctgncaannnttaaaaaaaaaannaaagacccccttnaaaaccncccccnttnccccttttngntnaaaanannnnggccnttcnnccaaatnaaaaaangggnaaangnntttngnnaannnggnctnntttctttaanaaaannannnnnacnnttttttaaatnnnnnnnnnnnntnnnnnnnnnnncnnaatttnnnnaaaaaaaaa

SEQ ID NO: 246 - DNA, 1410 bp, Homo Sapiens
  misc_feature (673)..(673): n is a, c, g, or t
  misc_feature (804)..(804): n is a, c, g, or t
  misc_feature (811)..(811): n is a, c, g, or t
  misc_feature (817)..(817): n is a, c, g, or t
  misc_feature (821)..(821): n is a, c, g, or t
  misc_feature (831)..(833): n is a, c, g, or t
  misc_feature (835)..(845): n is a, c, g, or t
  misc_feature (867)..(867): n is a, c, g, or t
  misc_feature (874)..(874): n is a, c, g, or t
  misc_feature (882)..(882): n is a, c, g, or t
  misc_feature (909)..(909): n is a, c, g, or t
  misc_feature (921)..(921): n is a, c, g, or t
  misc_feature (936)..(936): n is a, c, g, or t
  misc_feature (947)..(947): n is a, c, g, or t
  misc_feature (958)..(958): n is a, c, g, or t
  misc_feature (962)..(962): n is a, c, g, or t
  misc_feature (978)..(979): n is a, c, g, or t
  misc_feature (1000)..(1000): n is a, c, g, or t
  misc_feature (1003)..(1003): n is a, c, g, or t
  misc_feature (1014)..(1014): n is a, c, g, or t
  misc_feature (1018)..(1019): n is a, c, g, or t
  misc_feature (1035)..(1035): n is a, c, g, or t
  misc_feature (1044)..(1044): n is a, c, g, or t
  misc_feature (1069)..(1069): n is a, c, g, or t
  misc_feature (1082)..(1082): n is a, c, g, or t
  misc_feature (1085)..(1085): n is a, c, g, or t
  misc_feature (1098)..(1098): n is a, c, g, or t
  misc_feature (1100)..(1100): n is a, c, g, or t
  misc_feature (1106)..(1109): n is a, c, g, or t
  misc_feature (1126)..(1126): n is a, c, g, or t
  misc_feature (1133)..(1134): n is a, c, g, or t
  misc_feature (1136)..(1136): n is a, c, g, or t
  misc_feature (1139)..(1139): n is a, c, g, or t
  misc_feature (1150)..(1150): n is a, c, g, or t
  misc_feature (1156)..(1156): n is a, c, g, or t
  misc_feature (1178)..(1178): n is a, c, g, or t
  misc_feature (1192)..(1192): n is a, c, g, or t
  misc_feature (1204)..(1204): n is a, c, g, or t
  misc_feature (1206)..(1206): n is a, c, g, or t
  misc_feature (1215)..(1215): n is a, c, g, or t
  misc_feature (1219)..(1219): n is a, c, g, or t
  misc_feature (1223)..(1223): n is a, c, g, or t
  misc_feature (1225)..(1226): n is a, c, g, or t
  misc_feature (1232)..(1232): n is a, c, g, or t
  misc_feature (1234)..(1234): n is a, c, g, or t
  misc_feature (1240)..(1240): n is a, c, g, or t
  misc_feature (1246)..(1247): n is a, c, g, or t
  misc_feature (1259)..(1259): n is a, c, g, or t
  misc_feature (1281)..(1281): n is a, c, g, or t
  misc_feature (1293)..(1293): n is a, c, g, or t
  misc_feature (1298)..(1298): n is a, c, g, or t
  misc_feature (1309)..(1309): n is a, c, g, or t
  misc_feature (1325)..(1325): n is a, c, g, or t
  misc_feature (1328)..(1329): n is a, c, g, or t
  misc_feature (1333)..(1333): n is a, c, g, or t
  misc_feature (1344)..(1345): n is a, c, g, or t
  misc_feature (1347)..(1348): n is a, c, g, or t
  misc_feature (1356)..(1356): n is a, c, g, or t
  misc_feature (1358)..(1358): n is a, c, g, or t
  misc_feature (1362)..(1362): n is a, c, g, or t
  misc_feature (1366)..(1367): n is a, c, g, or t
  misc_feature (1370)..(1370): n is a, c, g, or t
  misc_feature (1381)..(1381): n is a, c, g, or t
  misc_feature (1385)..(1385): n is a, c, g, or t
  misc_feature (1409)..(1410): n is a, c, g, or t
agagaaattactatgagaggatcgcatcaccatcaccatcacggatcctatttaggtgacactatagaatcgtcgacccacgcgtccggagcagtgtccggccatggccggagcccgcaggctggagctaggcgaggccctggcgctggggtcgggctggcgtcatgcgtgccacgctctcctctacgcgccggaccctgggatgctcttcggccgcatcccgctgcgctacgccatactgatgcagatgcgcttcgatggacgcctgggcttccccggcggattcgtggacacgcaggacagaagcctagaggacgggctgaaccgcgagctgcgcgaggagctgggcgaagcggctgccgctttccgcgtggagcgcactgactaccgcagctcccacgtcgggtcagggccacgcgttgtggcccacttctatgccaagcgtctgacgctcgaggagctgttggctgtggaggccggcgcaacacgcgccaaggaccacgggctggaggtgctgggcctggtgcgagtgcccctgtataccctgcgggatggtgtaggaggcctgcctaccttcctggagaattcctttattggctctgcgcgggagcagttacttgaagctctccaggacttgggactgctgcagtctggctctatttcaggccttaanattccagctcatcactagaggcagccctccatggacccatgaaaactgagatgaggaccttggtactagggagggagggaaggacgtgggaatgttttcttattggatctgaaagatgatacatgataccngatgaanagaaanaaanaaaaaataannnannnnnnnnnnnggggcggccgcctccctataantgagtcntaattaanccttaattaacttgaacttggaactcntgtttgaaaaantccaagaaatgaacncaaaaactccnttctggatttntttnaaaaaccttccggttnnccccccgggcgtttttttttnggnaaaaatccaanttanntttggcaaaattttcnggaactaangaatttaaaattggaaaaaaaaatnccttggaataacnccnttttaaaattccnantggatnnnnaaaaaaatttttgaagnatttcanncnttnctcatgtaccnaaaacnaaaacttttcctgaaaataacncctttttaaaaccnaaaaaaaaaaancnaaatttttncggncttnannaaattntncccccnaaaaanncccccgaatttnaatgaaaaaaaaagggaattgnaaaaaaaaattnccctntaaaccttttnaaaaaaaaaaattttnctnngaanaaacaaaattnngnnttaaaatntncaangggnnttnaaaccctttcnaagnttaaaatttttccccccggaatann

SEQ ID NO: 247 - DNA, 1479 bp, Homo Sapiens
atggagcccgaggccccggattcccgcaagaggcccctcgaaacgccccccgaggtggtctgcaccaagcgcagcaacacgggagaggaaggcgaatacttcctgaaggtgctgatccccagctacgcggcgggctccatcattggcaagggcgggcagaccatcgtgcagctgcagaaggagaccggagccaccatcaagctctccaagtccaaagacttctaccccggaaccacagagcgggtatgcctagtacagggcacggcagaggccttgaatgctgtgcacagctttattgccgagaaggtccgagaaatcccacaagcgatgaccaagcctgaggtggtcaacatccttcaaccccaaaccacgatgaaccccgacagagccaagcaggccaagctgatcgtccccaacagcacggcgggcctgatcatcggcaagggaggcgccacggtgaaagccgtgatggaacagtcaggagcatgggtgcagctgtcccagaagccggagggcatcaacctgcaggagcgcgtggtgacggtcagcggcgagcccgagcaggtgcacaaggccgtgagcgccatcgtgcagaaggtacaagaagacccccagagcagcagctgcctcaacatcagctacgccaacgtggcaggccccgtggccaactccaaccccaccggctctccgtacgccagccccgcggatgtgcttccagccgcggccgcagcgtcggccgccgccgcctccggcctgctgggccccgccgggctggctggcgtgggggcctttcccgccgcgctgcccgccttctcaggcaccgacctgctggccatcagcacggcgcttaacacgctggccagttacggctacaacaccaactccctgggcctgggcctcaactcggccgcagcttccggcgtcctggccgccgtggccgccggggccaacccagcggccgccgccgccgccaacctcctggcatcctacgcgggcgaggccggggccgggccagccggaggggccgccccgccgccgcccccgcctcccggagccctggggtcctttgcgttggccgcagccgccaacggctacctcggggccggggcgggcggcggggcgggcggagggggcggcccgctggtggccgctgcagccgcggccggggcggccgggggcttcctgacggcggagaagctggcggctgagagtgccaaggagctggtggagattgcggtgcctgagaacctggtgggagccatcctggggaaggggggcaagacgttggtggagtaccaggagctgacgggcgctcgcatccagatctccaagaagggcgagttcctgccaggcacgcggaaccggcgggtcaccatcacgggcagccccgcggccacgcaagccgctcaatacctcatcagtcagcgggtcacctacgagcagggagtgagggcctcaaacccccagaaagtgggatga

SEQ ID NO: 248 - DNA, 1563 bp, Homo Sapiens
atggcggcggcggcggcggcggctggtgctgcagggtcggcagctcccgcggcagcggccggcgccccgggatctgggggcgcaccctcagggtcgcagggggtgctgatcggggacaggctgtactccggggtgctcatcaccttggagaactgcctcctgcctgacgacaagctccgtttcacgccgtccatgtcgagcggcctcgacaccgacacagagaccgacctccgcgtggtgggctgcgagctcatccaggcggccggtatcctgctccgcctgccgcaggtggccatggctaccgggcaggtgttgttccagcggttcttttataccaagtccttcgtgaagcactccatggagcatgtgtcaatggcctgtgtccacctggcttccaagatagaagaggccccaagacgcatacgggacgtcatcaatgtgtttcaccgccttcgacagctgagagacaaaaagaagcccgtgcctctactactggatcaagattatgttaatttaaagaaccaaattataaaggcggaaagacgagttctcaaagagttgggtttctgcgtccatgtgaagcatcctcataagataatcgttatgtaccttcaggtgttagagtgtgagcgtaaccaacacctggtccagacctcatggaattacatgaacgacagccttcgcaccgacgtcttcgtgcggttccagccagagagcatcgcctgtgcctgcatttatcttgctgcccggacgctggagatccctttgcccaatcgtccccattggtttcttttgtttggagcaactgaagaagaaattcaggaaatctgcttaaagatcttgcagctttatgctcggaaaaaggttgatctcacacacctggagggtgaagtggaaaaaagaaagcacgctatcgaagaggcaaaggcccaagcccggggcctgttgcctgggggcacacaggtgctggatggtacctcggggttctctcctgcccccaagctggtggaatcccccaaagaaggtaaagggagcaagccttccccactgtctgtgaagaacaccaagaggaggctggagggcgccaagaaagccaaggcggacagccccgtgaacggcttgccaaaggggcgagagagtcggagtcggagccggagccgtgagcagagctactcgaggtccccatcccgatcagcgtctcctaagaggaggaaaagtgacagcggctccacatctggtgggtccaagtcgcagagccgctcccggagcaggagtgactccccaccgagacaggccccccgcagcgctccctacaaaggctctgagattcggggctcccggaagtccaaggactgcaagtacccccagaagccacacaagtctcggagccggagttcttcccgttctcgaagcaggtcacgggagcgggcggataatccgggaaaatacaagaagaaaagtcattactacagagatcagcgacgagagcgctcgaggtcgtatgaacgcacaggccgtcgctatgagcgggaccaccctgggcacagcaggcatcggaggtga

SEQ ID NO: 249 - DNA, 411 bp, Homo Sapiens
atggtgttgttggagagcgagcagttcctgacggagctgaccagacttttccagaagtgccggacgtcgggcagcgtctatatcaccttgaagaagtatgacggtcgaaccaaacccattccaaagaaaggtactgtggagggctttgagcccgcagacaacaagtgtctgttacgagctaccgatgggaagaagaagatcagcactgtggtgagctccaaggaagtgaataagtttcagatggcttattcaaacctccttagagctaacatggatgggctgaagaagagagacaaaaagaacaaaactaagaagaccaaagcagcagcagcagcagcagcagcagcacctgccgcagcagcaacagcagcaacaacagcagcagcaacagcagcaacagcagcacagtaa

SEQ ID NO: 250 - DNA, 2577 bp, Homo Sapiens
atgtcggtggtggggttggacgtgggctcgcagagctgctacatcgcggtagcccgggccgggggcatcgagaccatcgccaatgagttcagcgaccggtgcaccccgtcagtcatatcatttggatcaaaaaatagaacaatcggagttgcagccaaaaatcagcaaatcactcatgcaaacaatacggtgtctaacttcaaaagatttcatggccgagcattcaatgaccccttcattcaaaaggagaaggaaaacttgagttacgatttggttccattgaaaaatggtggagttggaataaaggtaatgtacatgggtgaagaacatctatttagtgtggagcagataacagccatgttgttgactaagctgaaggaaactgctgaaaacagcctcaagaaaccagtaacagattgtgttatttcagtcccctccttctttacagatgctgagaggcgatctgtgttagatgctgcacagattgttggcctaaactgtttaagacttatgaatgacatgacagctgttgctttgaattacggaatttataagcaggatctcccaagcctggatgagaaacctcggatagtggtttttgttgatatgggacattcagcttttcaagtgtctgcttgtgcttttaacaagggaaaattgaaggtactgggaacagcttttgatcctttcttaggaggaaaaaacttcgatgaaaagttagtggaacatttttgtgcagaatttaaaactaagtacaagttggatgcaaaatccaaaatacgagcactcctacgtctgtatcaggaatgtgaaaaactgaaaaagctaatgagctctaacagcacagaccttccactgaatatcgaatgctttatgaatgataaagatgtttccggaaagatgaacaggtcacaatttgaagaactctgtgctgaacttctgcaaaagatagaagtacccctttattcactgttggaacaaactcatctcaaagtagaagatgtgagtgcagttgagattgttggaggcgctacacgaattccagctgtgaaggaaagaattgccaaattctttggaaaagatattagcacaacactcaatgcagatgaagcagtagccagaggatgtgcattacagtgtgcaatactttccccggcatttaaagttagagaattttccgtcacagatgcagttccttttccaatatctctgatctggaaccatgattcagaagatactgaaggtgttcatgaagtctttagtcgaaaccatgctgctcctttctccaaagttctcacctttctgagaagggggccttttgagctagaagctttctattctgatccccaaggagttccatatccagaagcaaaaataggccgctttgtagttcagaatgtttctgcacagaaagatggagaaaaatctagagtaaaagtcaaagtgcgagtcaacacccatggcattttcaccatctctacggcatctatggtggagaaagtcccaactgaggagaatgaaatgtcttctgaagctgacatggagtgtctgaatcagagaccaccagaaaacccagacactgataaaaatgtccagcaagacaacagtgaagctggaacacagccccaggtacaaactgatgctcaacaaacctcacagtctcccccttcacctgaacttacctcagaagaaaacaaaatcccagatgctgacaaagcaaatgaaaaaaaagttgaccagcctccagaagctaaaaagcccaaaataaaggtggtgaatgttgagctgcctattgaagccaacttggtctggcagttagggaaagaccttcttaacatgtatattgagacagagggtaagatgataatgcaagataaattggaaaaagaaaggaatgatgctaaaaatgcagttgaggaatatgtgtatgagttcagagacaagctgtgtggaccatatgaaaaatttatatgtgagcaggatcatcaaaattttttgagactcctcacagaaactgaagactggctgtatgaagaaggagaggaccaagctaaacaagcatatgttgacaagttggaagaattaatgaaaattggcactccagttaaagttcggtttcaggaagctgaagaacggccaaaaatgtttgaagaactaggacagaggctgcagcattatgccaagatagcagctgacttcagaaataaggatgagaaatacaaccatattgatgagtctgaaatgaaaaaagtggagaagtctgttaatgaagtgatggaatggatgaataatgtcatgaatgctcaggctaaaaagagtcttgatcaggatccagttgtacgtgctcaggaaattaaaacaaaaatcaaggaattgaacaacacatgtgaacccgttgtaacacaaccgaaaccaaaaattgaatcacccaaactggaaagaactccaaatggcccaaatattgataaaaaggaagaagatttagaagacaaaaacaattttggtgctgaacctccacatcagaatggtgaatgttaccctaatgagaaaaattctgttaatatggacttggactag

SEQ ID NO: 251 - DNA, 1314 bp, Homo Sapiens
atggcagcggccactctgaggacgccaactcagggcactgtgacctttgaagatgtggccgtacacttctcctgggaggaatggggtctccttgatgaggctcaaagatgcctgtaccgtgatgtgatgctggagaacttggctcttttaacctctctagatgttcatcatcagaagcagcaccttggagaaaaacatttcagaagcaatgtgggcagagccttgtttgtgaagacctgcacattccatgtgtcaggggagccttccacctgcagagaagttgggaaggacttcctggccaagttgggatttctccatcaacaggctgctcacactggggagcaatcaaatagcaaaagcgacggtggggccatcagtcacagaggaaaaactcattacaactgtggagaacacacaaaagcattcagcggtaaacacacacttgttcagcagcagagaaccctcactacagaaagatgttacatatgcagtgaatgtgggaaatcctttagcaaaagctacagtctcaatgaccattggagacttcacactggagaaaagccttatgaatgtcgagagtgtgggaagtcctttaggcaaagctctagtctcattcagcaccggagagttcacactgcagtacgacctcatgaatgtgatgaatgtggaaaattatttagcaacaagtctaacctcattaaacatcggagagttcacactggggaaaggccatatgagtgcagtgaatgtgggaaatcctttagccaaaggtctgcactccttcaacatcggggagttcacactggggagaggccttatgagtgcagtgaatgtgggaagttttttacatatcattccagtctcataaaacaccagaaagttcacagtggatccaggccttatgagtgcagcgaatgtgggaagtcatttagccaaaactctagcctcattgaacaccatagggttcacactggagaaaggccttataagtgcagcgaatgtgggaaatcctttagccaaaggtctgcactccttcaacatcggggagttcacactggggagaggccttatgagtgcagtgaatgtgggaagttctttccctacagctccagtctccgaaaacaccagagagttcacactggatcaagaccctatgagtgcagtgaatgtgggaaatcctttactcaaaattccggcctcattaagcacaggagggttcacactggggagaagccttatgagtgcacggaatgtgggaaatcctttagccataactccagccttattaaacatcagagaattcatagtcgataa

SEQ ID NO: 252 - DNA, 3264 bp, Homo Sapiens
atgacgaccgaatctggatcagactcggaatccaagccggaccaggaggccgagccccaggaggcggcgggggcgcaggggcgcgcgggggcgcccgtgccggagccgcccaaggaggagcagcagcaggccctggagcagttcgccgccgctgcagcgcacagcaccccggtgcggagggaggtcactgacaaggaacaggagtttgctgccagggctgcaaaacagctcgaatatcagcaattagaagacgataaactttctcagaaatcatctagcagtaaactctctcggtctccattaaagattgtcaaaaagcctaaaagcatgcagtgcaaagtgatacttctcgatggatcagaatatacctgtgatgtagagaaacgctccagaggacaagtgctgtttgataaagtgtgtgaacacttgaacttgctagagaaagactactttgggcttacgtatcgagatgctgaaaaccagaagaattggttggaccctgctaaggaaataaaaaaacaggttcgaagtggtgcttggcacttttcatttaatgtgaaattttatccaccagaccctgcccaactatctgaagatatcaccaggtactacctctgcttgcagttgcgagatgacatcgtgtccggaaggctgccctgctcctttgttaccctggccttgctgggctcctacactgtccagtcagagctcggagactatgacccagatgaatgtgggagcgattacattagtgagttccgctttgcaccaaaccacactaaagaactggaagacaaagtgatcgagctgcacaagagccacagaggaatgacgccagcagaagcagagatgcatttcttggaaaatgccaaaaaattatcaatgtatggggtagatttacatcatgctaaggactcagaaggggtagaaattatgttaggagtttgtgcaagtggtctgttgatatatcgcgaccggctgcgaataaacagatttgcctggcccaaggttctaaagatttcatacaaacggaacaacttttacattaagatccggccgggagagtttgaacaatttgaaagcaccattgggtttaagctgccaaaccatcgagctgccaagcgtttatggaaagtatgtgttgagcatcatacatttttcagactactgttaccagaagcacctcccaagaaattcctaaccttgggttccaagtttcgttatagtggcaggacacaagcgcaaacgagaagagccagtgcgttgatagatcgcccagcaccttactttgaacgctcatccagcaaacgttataccatgtctcgcagcttggatggagaggttggtactggccagtacgccacaacaaaaggcatctctcagaccaacttgatcaccactgtgactccggagaagaaggctgaggaggagcgggacgaggaagaggacaaacggaggaagggggaagaagtcacgcccatctcggccatccggcacgagggaaagtcacctgggcttggcactgactcatgtcccttgtcacccccatccacccattgtgcccccacatctcccacagagctccgtaggaggtgtaaggagaatgactgcaaactgccaggttatgagccgtccagagctgagcacctgcctggagagcccgccttggactctgatggcccagggaggccttacctaggggatcaagatgtggcttttagctacagacagcaaactggcaaggggaccaccctgttctccttctccttgcagctccctgagtcattcccctccctcctagatgatgatggatacctctctttccccaacctttctgaaaccaacctcctgccccagagcttgcagcattacctcccgatccgctcaccgtcccttgtgccctgtttcctcttcatctttttctttctgctgtctgcctccttctcagtgccatacgctctcactctctccttccctctggctctgtgcctctgctacctggagcccaaggcggcctccttgagcgcctccctagacaatgacccgagtgacagttcagaggaagagactgacagtgagcgcacggacaccgcagccgacggggagaccaccgccactgagtcggaccaggaggaagatgcagagctcaaggcacaggagctagaaaaaactcaagatgacctgatgaaacatcaaaccaacattagcgagctgaaaagaaccttcttagaaacctcaacagacactgccgtaacgaatgaatgggagaagaggctttccacctcccccgtgcgactggccgccaggcaggaggatgcccccatgatcgaaccacttgtccctgaagagactaagcagtcttctggggaaaagctcatggatggctctgaaatcttcagtttattagagtctgcgcgaaaaccaacagaattcataggaggggttacttctacttctcaaagctgggttcagaaaatggaaaccaagacggagtccagtggaatagagacggaacccaccgtgcaccacctgccgcttagcactgagaaggtggtgcaggagaccgtgttggtggaggagcggcgtgtggtgcacgcgagtggggatgcttcttactcggcgggagacagcggggatgctgcagcacagcccgcattcacaggcattaaagggaaagagggctctgccttgacggagggggctaaagaggaaggaggggaggaggtcgctaaagctgtcctggaacaggaagagacagccgctgcttcccgtgagcgacaagaggagcagagtgcagccatccacatttcagaaactttggaacaaaaacctcattttgagtcctcaacggtgaagacggaaaccatcagttttggcagtgtttcaccgggaggagtaaagctagaaatttccacgaaggaagtgccagtagttcacaccgaaaccaaaaccatcacatatgaatcatcacaggtcgatccaggcacagatctggagccaggcgtgctgatgagtgcacagacgatcacatctgaaaccaccagtaccaccaccactacgcacatcaccaaaactgtgaaagggggcatttcagagacaagaattgagaagcgaatagtcatcacgggggatgcagacattgaccatgaccaggcgctggctcaggcaattaaagaggccaaagagcagcaccctgacatgtcagtgaccaaagtagtggtccataaagagacagagatcacaccagaagatggagaggattga

SEQ ID NO: 253 - DNA, 786 bp, Homo Sapiens
atggctgccgctgtgccccgcgccgcatttctctccccgctgcttccccttctcctgggcttcctgctcctctccgctccgcatggcggcagcggcctgcacaccaagggcgcccttcccctggatacggtcactttctacaaggtcattcccaaaagcaagttcgtcttggtgaagttcgacacccagtacccctacggtgagaagcaggatgagttcaagcgtcttgctgaaaactcggcttccagcgatgatctcttggtggcagaggtggggatctcagattatggtgacaagctgaacatggagctgagtgagaaatacaagctggacaaagagagctacccagtcttctacctcttccgggatggggactttgagaacccagtcccatacactggggcagttaaggttggagccatccagcgctggctgaaggggcaaggggtctacctaggtatgcctggttgcctgcctgtatacgacgccctggccggggagttcatcagggcctctggtgtggaggcccgccaggccctcttgaagcaggggcaagataacctctcaagtgtgaaggagactcagaagaagtgggccgagcaatacctgaagatcatggggaagatcttagaccaaggggaggacttcccagcatcagagatgacacggatcgccaggctgattgagaagaacaagatgagtgacgggaagaaggaggagctccagaagagcttaaacatcctgactgccttccagaagaagggggccgagaaagaggagctgtaa

SEQ ID NO: 254 - DNA, 1689 bp, Homo Sapiens
atggatccgcagcctcctccacccgcccagggcagcccacctcaccgtggccgaggccggggccgtggccgaggccgtggtcggggccgtggccgtggcagggggggcgctggagcccctagggcgcccctgccctgccccacctgcggccgcctcttccgtttcccctactacctctcccggcaccggctgagccactcggggctccggccccacgcctgcccgctgtgccccaaggccttccgccggccggcccacctttcccgccacctgcgcggccacgggccccagcccccgctgcgctgcgccgcctgcccccgcaccttcccagaaccggcccagctcaggcgccacctggctcaggagcacgcgggcggcgaggtcgagctggccatcgagagggtggccaaggagacggccgaacccagctggggcccgcaggacgagggctcggagccgcccaccaccgctgcagcaggggccacggaggaggaggcggtcgcagcgtggcctgagacgtggcctgcgggggagccttccacgctggctgcgcccaccagcgccgcggagccccgggagtcggagtcggaggaggccgaggccggggcagcagagctgagggccgagctggcgctggcggccgggcggcaggaggagaaacaggtcctgctccaggcagaccggacgctgctgtgtctgcgctgccgcgaagccttcgccaccaagggcgagctcaaggcgcacccgtgtctgcgccccgagggcgaacaggaaggggaaggggggcccccgccacgccccaagcgacaccagtgctccatctgcctcaaggccttcgccaggccctggtccctgtcgcgccaccggctggtccactccaccgaccgccctttcgtgtgcccagactgcggcctggccttccgcctcgcctcctacctccgccagcaccgccgcgtccacggccccctcagcctgctggccccgctgcccgcggcgggcaagaaggacgacaaggcctcgggtgcacggaactcagccaaggggccggaggggggcgagggggcggagtgcgggggtgcctcggaagggggagaagggcagaacggaggcgacgccgccccggctcggccccccgccggggagccccgcttctggtgcccagagtgcggcaaaggtttcaggcgccgggcgcacctgcggcagcacggggtgacccactcgggagcgcgccccttccagtgcgtgcgctgccagcgggagttcaagcgcctggccgacctggcgcgccacgcacaggtgcacgcggggggcccagccccgcacccgtgcccccgctgcccgcgccgcttctcgcgcgcctacagcctcctgcgccaccagcgctgccaccgcgcagagctggagagggccgccgcgctgcaggcactgcaggcccaggccccgacgtcgccgccaccgcccccgccgcccctgaaggccgagcaggaggaagaagggctcccgctgcccctcgcaaacattaaggaagagccgccctctccggggaccccaccccagtccccgccggctccccctgtcttcctcagcgcctcctgtttcgacagccaagaccactcagccttcgagatggaggaggaagaggtagacagcaaggctcacctgcgcgggctggggggcctggcctcctga

SEQ ID NO: 255 - DNA, 1887 bp, Homo Sapiens
atggattcgggcagcagcagcagcgactcggcgcccgattgctgggaccaggtggacatggaatccccggggtcggccccgagcggggatggagtctcctctgcggtggccgaggcccagcgcgagcccctcagctcggctttcagccgtaagctcaacgtcaacgccaagcccttcgtgcctaacgtacacgccgcggagttcgtgccgtccttcctgcggggcccgactcagccgcccaccctcccggccggctccggcagcaacgatgaaacctgcaccggcgcgggataccctcaaggtaaaaggatgggacggggggcacctgtggaaccttcccgagaggaaccgttagtgtcgcttgaaggttccaattcagccgttaccatggaactttcagaacctgttgtagaaaatggagaggtggaaatggccctagaagaatcatgggagcacagtaaagaagtaagtgaagccgagcctgggggtggttcctcgggagattcagggcccccagaagaaagtggccaggaaatgatggaggaaaaagaggaaataagaaaatccaaatctgtgatcgtaccctcaggtgcacctaagaaagaacacgtaaatgtagtattcattggccatgtagacgctggcaagtcaaccatcggaggacagataatgtttttgactggaatggttgacaaaagaacactggagaaatatgaaagagaagctaaggaaaaaaacagagaaacctggtatttgtcctgggccttagatacaaatcaggaggaacgagacaagggtaaaacagtcgaagtgggtcgtgcctattttgaaacagaaaggaaacatttcacaattttagatgcccctggccacaagagttttgtcccaaatatgattggtggtgcttctcaagctgatttggctgtgctggtcatctctgccaggaaaggagagtttgaaactggatttgaaaaaggtggacagacaagagaacatgcgatgttggcaaaaacggcaggggtaaaacatttaatagtgcttattaataagatggatgatcccacagtaaattggagcatcgagagatatgaagaatgtaaagaaaaactggtgccctttttgaaaaaagtaggcttcagtccaaaaaaggacattcactttatgccctgctcaggactgaccggagcaaatattaaagagcagtcagatttctgcccttggtacactggattaccatttattccgtatttggataacttgccaaacttcaacagatcaattgatggaccaataagactgccaattgtggataagtacaaagatatgggcactgtggtcctgggaaagctggaatccgggtccatttttaaaggccagcagctcgtgatgatgccaaacaagcacaatgtagaagttcttggaatactttctgatgatactgaaactgattttgtagccccaggtgaaaacctcaaaatcagactgaagggaattgaagaagaagagattcttccaggattcatactttgtgatcctagtaacctctgccattctggacgcacgtttgatgttcagatagtgattattgagcacaaatccatcatctgcccaggttataatgcggtgctgcacattcatacttgtattgaggaagttgagataacagcgttaatctccttggtagacaaaaaatcaggagaaaaaagtaagacacgaccccgcttcgtgaaacaagatcaagtatgcattgctcgtttaaggacagcaggaaccatctgcctcgagacgttcaaagattttcctcagatgggtcgttttactttaagagatgagggtaagaccattgcaattggaaaagttctgaaattggtcccagagaaggactaa

SEQ ID NO: 256 - DNA, 3948 bp, Homo Sapiens
atggaaaagtaccacgtgttggagatgattggagaaggctcttttgggagggtgtacaagggtcgaagaaaatacagtgctcaggtcgtggccctgaagttcatcccaaaattggggcgctcagagaaggagctgaggaatttgcaacgagagattgaaataatgcggggtctgcggcatcccaacattgtgcatatgcttgacagctttgaaactgataaagaggtggtggtggtgacagactatgctgagggagagctctttcagatcctagaagatgacggaaaacttcctgaagaccaggttcaggccattgctgcccagttggtgtcagccctgtactatctgcattcccaccgcatcctacaccgagatatgaagcctcagaacatcctcctcgccaagggtggtggcatcaagctctgtgactttggatttgcccgggctatgagcaccaatacaatggtgctgacatccatcaaaggcacaccactctatatgtctccagagctggtggaggagcgaccatacgaccacacagcggacctctggtctgttggctgcatactatatgaactggcagtaggcacccctcccttctatgctacaagcatctttcagctggtcagcctcattctcaaggaccctgtgcgctggccctcaaccatcagtccctgctttaagaacttcctgcagggactgctcaccaaagacccacggcagcgactgtcctggccagacctcttatatcacccctttattgctggtcatgtcaccataataactgagccagcaggcccagatttggggaccccattcaccagccgcctacccccagaacttcaggtcctaaaggacgaacaggcccatcggttggcccccaagggtaatcagtctcgcatcttgactcaggcctataaacgcatggctgaggaggccatgcagaagaaacatcagaacacaggacctgcccttgagcaagaggacaagaccagcaaggtggctcctggcacagcccctctgcccagactcggggccactcctcaggaatcaagcctcctggccgggatcttagcctcagaattgaagagcagctgggctaaatcagggactggagaggtgccctctgcacctcgggaaaaccggaccaccccagattgtgaacgagcattcccagaggagaggccagaggtgctgggccagcggagcactgatgtagtggacctggaaaatgaggagccagacagtgacaatgagtggcagcacctgctagagaccactgagcctgtgcctattcaactgaaggctcctctcaccttgctgtgtaatcctgacttctgccagcgcatccagagtcagctgcatgaagctggagggcagatcctgaaaggcatcttggagggtgcttcccacatcctgcctgcattccgggtcctgagcagtcttctctccagctgcagtgattctgttgccttgtattccttctgccgggaggcagggcttcctgggctgctgctgagtctactcaggcacagtcaggagagcaacagcctccagcagcaatcttggtatgggaccttcttacaggacctgatggctgtgattcaggcctactttgcctgtaccttcaatctggagaggagccagacaagtgacagcctgcaggtgtttcaggaggctgccaacctttttctggacctgttggggaaactgctggcccaaccagatgactctgagcagactttgcggagggacagccttatgtgctttactgtcctgtgcgaagccatggatgggaacagccgggccatctccaaagccttttactccagcttgctgacgacacagcaggttgtcttggatgggctccttcatggcttgacagttccacagctccctgtccacactccccaaggagccccgcaagtgagccagccactgcgagagcagagtgaggatatacctggagccatttcctctgccctggcagccatatgcactgctcctgtgggactgcccgactgctgggatgccaaggagcaggtctgttggcatttggcaaatcagctaactgaagacagcagccagctcaggccatccctcatctctggcctgcagcatcccatcctgtgcctgcaccttctcaaggttctatactcctgctgccttgtcagtgagggcctgtgccgtcttctggggcaggagcccctggccttggaatccctgtttatgttgattcagggcaaggtaaaagtagtagattgggaagagtctactgaagtgacactctacttcctctcccttcttgtctttcggctccaaaacctgccttgtggaatggagaagctaggcagtgacgttgctactctctttacccattcgcatgtcgtctctcttgtgagtgcagcagcctgtctattgggacagcttggtcagcaaggggtgacctttgacctccagcccatggaatggatggctgcagccacacatgccttgtctgcccctgcagaggttcggttgactccaccaggtagttgtggattctatgatggcctccttatccttctgttgcagctcctcactgagcaggggaaggctagcctaatcagggatatgtccagttcagaaatgtggaccgttttgtggcaccgcttctccatggtcctgaggctccccgaggaggcatctgcacaggaaggggagctttcgctatccagtccaccaagccctgagccagactggacactgatttctccccagggcatggcagccctgctgagcctggccatggccacctttacccaggagccccagttatgcctgagctgcctgtcccagcatggaagtatcctcatgtccatcctgaagcatctgctttgccccagcttcctgaatcaactgcgccaggcgcctcatgggtctgagtttctccctgtcgtggtgctctctgtctgccagctcctttgcttcccctttgcgctggacatggatgctgacctccttataggtgtcttggccgacctcagggactcagaagttgcagcccatctgctgcaggtctgctgctaccatcttccgttgatgcaagtggagctgcccatcagccttctcacacgcctggccctcatggatcccacctctctcaaccagtttgtgaacacagtgtctgcctcccctagaaccatcgtctcgtttctctcagttgccctcctgagtgaccagccactgttgacctccgaccttctctctctgctggcccatactgccagggtcctgtctcccagccacttgtcctttatccaagagcttctggctggctctgatgaatcctatcggcccctgcgcagcctcctgggccacccagagaattctgtgcgggcacacacttataggctcctgggacacttgctccaacacagcatggccctgcgtggggcactgcagagccagtctggactgctcagccttctgctgcttgggcttggagacaaggatcctgttgtgcggtgcagtgccagctttgctgtgggcaatgcagcctaccaggctggtcctctgggacctgccctggcagctgcagtgcccagtatgacccagctgcttggagatcctcaggctggtatccggcgcaatgttgcatcagctctgggcaacttgggacctgaaggtttgggagaggagctgttacagtgcgaagtaccccagcggctcctagaaatggcatgtggagacccccagccaaatgtgaaggaggctgccctcattgccctccggagcctgcaacaggagcctggcatccatcaggtactggtgtccctgggtgccagtgagaaactatccttgctctctctggggaatcagtcactgccacacagcagtcctaggcctgcctctgccaaacactgcaggaaactcattcacctcctgaggccagcccatagcatgtga

SEQ ID NO: 257 - DNA, 4827 bp, Homo Sapiens
atgtattcggcccacaggcccctgatgcccgcgtccagcgcggcctcccgtggcctcggcatgttcgtgtggacgaatgtggaacctcgctctgtggctgtgttcccttggcactccttagtccccttcctggcacccagccagcctgacccctccgtgcagccgagcgaggcccagcaacctgccagccacccagtggcctccaaccagagcaaagaacctgctgagtcggcagctgttgctcatgaacggccaccaggtgggacagggagtgctgaccctgagcggccccctggagccacatgccctgagagcccaggacccggacccccacaccctttgggggtggtggaatctggtaagggtccgcctcccaccacggaggaggaggcctccggccccccaggagagccccggctggacagtgagacagagagtgaccatgatgatgccttcctctccatcatgtctcctgagatccagttgcctctaccgcccggaaaacgtcggacccagtccctcagtgccctacccaaggaacgggactcatcttctgagaaggatggacgcagccccaacaagcgggagaaggaccacatccggcggcccatgaatgccttcatgatcttcagcaagcggcaccgggccctggtccaccagcgtcatcccaaccaggacaaccggaccgtcagcaagatcctgggcgagtggtggtatgccctggggcccaaggagaagcagaagtaccacgacctggccttccaggtgaaggaggcccacttcaaggcccacccagattggaagtggtgcaacaaggaccgaaagaagtccagctcagaggccaagcccacgagcctggggctggcaggagggcacaaggagacgcgggagcggagcatgtcggagacgggcactgctgctgcccctggggtgtcctctgagctcctgtccgttgcagcccagacactcctgagctcagacaccaaggctccggggagcagctcctgtggggcagaacggctacacacagttgggggacctggctcagcccggccccgagctttctcccacagcggggtacacagcctggacggcggagaagtagacagtcaggcgctacaggaactgacgcagatggtgtctggccctgcatcgtactctggcccaaagccttctacccagtatggagctccaggaccctttgcagcccctggtgagggaggtgccttggcggccactgggcggcccccgctgctgcccacccgagcttctcgttctcagcgtgcggccagtgaggacatgacgagtgatgaggagcgcatggtcatctgtgaggaggaaggggatgatgatgtcattgctgacgatggcttcggcaccactgacattgatctcaagtgcaaggagcgggtgaccgacagcgagagtggggacagctctggggaggacccagagggcaacaagggctttggtcggaaggtgttttcacctgtgatccgttcctcctttacccactgccgccccccactggaccctgagcccccagggcccccggatcctcctgtagcctttggcaaaggctatggttccgccccatcctcctctgcgtcctcgcctgcttcctcctcagcctcggcagccacctccttctcactgggctcaggaaccttcaaggcccaggagtctggtcagggcagcacagcgggccccctacggcccccaccccctggggctgggggtccagcgacaccttccaaggcaacccggttcctcccaatggatcctgccaccttccggcgcaagagacccgaaagtgtgggtggcctggagccaccaggcccctcagtcatcgcggcccctcccagcggaggaggaaacatcctgcagacactggtgctgcccccaaacaaggaggagcaagagggcggcggagccagagtgccctccgcccccgccccatcactggcctatggggccccagcagctcccctgtcccgtcctgccgccaccatggtcaccaatgtggtgcggcctgtcagcagcactcctgtgcccatcgcctctaagcccttccccacctctggccgggctgaggcgtctccaaatgacacagcaggtgccaggactgaaatgggcactgggtctcgggtgcctgggggctccccgctgggtgtcagcttagtgtattcggacaagaagtcggcagcagccacctcaccagccccacacttggtggctggacccctgctgggcactgtggggaaggcgcctgccactgtcactaacctactggtgggcaccccggggtatggggcccctgcgccccctgctgtccagttcattgcccagggggcccctggtggtgggaccactgcgggctcaggagcaggtgctgggagtggccccaatgggccagtacccctgggcatcctgcaaccaggtgccctgggcaaggctgggggaatcacccaggtacagtacatcctgcccacgctgccccagcagcttcaggtggcacctgccccagcaccagcccctgggaccaaggcagcggctcccagcggccctgcacccaccaccagcatccgtttcaccctcccaccgggcacttccaccaacggcaaagtcctggctgccactgcacccactcctggcatccccatcctgcagtctgtaccctccgccccaccccccaaagcccagtcagtttctcccgtgcaggccccgcccccgggtggctcagcccagctgctgcctgggaaggtcctagtgcctctggccgcccctagcatgtcagtgcggggtggaggggccggccagccactgccactggtgagcccgcccttctcagtacctgtgcagaatggtgcccagccccccagcaagatcatccagctgaccccggtgcctgtgagcacacccagcggcctggtgccgcccctgggcccagccacactccctggacccacctctcagcctcagaaggtcctgttgccctcctccaccagaatcacctatgtgcagtcagcgggcgggcacgcgctgcccctgggtaccagccctgcgtccagccaggctggaacagtcacctcgtacgggcccacgagctctgtagctctaggcttcacctcgctggggcccagcggccccgccttcgtgcagcccctgctctcagcaggccaagccccactgctggctcccggtcaggtgggcgtgtcacctgtgcccagtccccagctgccgcctgcctgtgcagcccccggaggtcctgtcataacagcattttactctggcagccctgcacccacctcctcagcacccctggcccagccatcccaggcccccccaagcctggtctacactgtggccaccagcacaaccccacctgcagccaccattctgcccaagggcccgccagcccctgccactgccaccccagccccgactagccctttccccagcgccacagcaggttccatgacctacagcttagtggcccccaaggcccagcggcccagcccgaaggccccccagaaagtgaaggcagccatcgccagcattcccgtggggtcctttgaggcaggtgcctctgggcggcctggccctgcaccccggcagcctctggagcctggcccagtccgagagccaactgccccagagtctgagcttgaggggcagcccacaccaccagcccctccacccctgccagagacctggactcccacggcccggagcagccccccactgcccccacctgctgaggagcggaccagcgccaagggccctgagaccatggccagcaaattccccagctcatcttcagactggcgcgtccctgggcagggcctggagaatcgtggggagcctcccactcctcccagcccggccccagctccagctgtagcccctggtggcagcagcgagagcagcagtgggcgggcagccggggacaccccggagcgcaaggaggcggctggtactggcaagaaggtgaaggtgcggcccccgcccctgaagaagacctttgactctgtggacaacagggtcctgtcagaagtggacttcgaagagcgctttgctgagttgcctgagtttcggcctgaggaggtgctgccctcccccaccctgcagtctctggccacctcaccccgggccatcctgggctcttaccgcaagaagaggaagaactccacggacctggattcagcacccgaggaccccacctcgcccaagcgcaagatgagaagacgctccagctgcagctcggagcccaacacccccaagagtgccaagtgcgagggggacatcttcacctttgaccgtacaggtacagaagccgaggacgtgcttggggagctagagtatgacaaggtgccatactcctccctgcggcgcaccctggaccagcgccgggccctggtcatgcagctctttcaggaccatggcttcttcccgtcagcccaggccacagccgccttccaggcccgctatgcagacatctttccctccaaggtttgtctgcagttgaagatccgtgaggtgcgccagaagatcatgcaggctgccactcccacggagcagccccctggagctgaggctcctctccctgtaccgccccccactggcaccgctgctgcccctgcccccactcccagccccgcagggggccctgaccccacctcacccagctcggactctggcacggcccaggctgccccgccactgcctccacccccagagtcggggcctggacagcctggctgggagggggctccccagccctcccccccacccccaggtccctccacagctgccacaggcaggtga

SEQ ID NO: 258 - DNA, 942 bp, Homo Sapiens
atgtcccagagcaggcaccgcgccgaggccccgccgctggagcgcgaggacagtgggaccttcagtttggggaagatgataacagctaagccagggaaaacaccgattcaggtattacacgaatacggcatgaagaccaagaacatcccagtttatgaatgtgaaagatctgatgtgcaaatacacgtgcccactttcaccttcagagtaaccgttggtgacataacctgcacaggtgaaggtacaagtaagaagctggcgaaacatagagctgcagaggctgccataaacattttgaaagccaatgcaagtatttgctttgcagttcctgaccccttaatgcctgacccttccaagcaaccaaagaaccagcttaatcctattggttcattacaggaattggctattcatcatggctggagacttcctgaatataccctttcccaggagggaggacctgctcataagagagaatatactacaatttgcaggctagagtcatttatggaaactggaaagggggcatcaaaaaagcaagccaaaaggaatgctgctgagaaatttcttgccaaatttagtaatatttctccagagaaccacatttctttaacaaatgtagtaggacattctttaggatgtacttggcattccttgaggaattctcctggtgaaaagatcaacttactgaaaagaagcctccttagtattccaaatacagattacatccagctgcttagtgaaattgccaaggaacaaggttttaatataacatatttggatatagatgaactgagcgccaatggacaatatcaatgtcttgctgaactgtccaccagccccatcacagtctgtcatggctccggtatctcctgtggcaatgcacaaagtgatgcagctcacaatgctttgcagtatttaaagataatagcagaaagaaagtaa

SEQ ID NO: 259 - DNA, 876 bp, Homo Sapiens
atggcggttaccctgagtctcttgctgggcgggcgcgtttgcgccgccgtcactcgctgtgggttcgcgacccggggggtggcgggcccaggccctattggccgggagccggaccccgattccgactgggagccggaggaacgggagctgcaggaggtggagagcaccctgaaacgacagaaacaagcaatccgattccagaaaattcggaggcaaatggaggcgcctggtgccccgcccaggaccctgacgtgggaagccatggagcagatacggtatttacatgaggaatttccagagtcctggtcagttcccaggttggctgaaggctttgatgtcagcactgatgtgatccgaagagttttaaaaagcaagtttttacccacattggagcagaagctgaagcaggatcaaaaagtccttaagaaagctgggcttgcccactcgctgcagcacctccggggctctggaaatacctcaaagctgctccctgcaggccactctgtatcaggctctttgcttatgccagggcatgaagcctcatctaaagacccaaatcacagcacagctttgaaagtgatagagtcagacactcacaggacaaatacaccaaggagaaggaagggaagaaataaagaaatccaggacctggaggagagctttgtgcctgttgctgcacccctaggtcatccaagagagctgcagaagtactccagtgattctgagagccccagaggaactggcagtggtgcgttgccaagtggtcagaagctggaggagttgaaggcagaggagccagataacttcagcagcaaagtagtgcagaggggccgagagttctttgacagcaacgggaacttcctgtacagaatttga

SEQ ID NO: 260 - DNA, 9804 bp, Homo Sapiens
atgcagaaagcccggggcacgcgaggcgaggatgcgggcacgagggcaccccccagccccggagtgcccccgaaaagggccaaggtgggggccggcggcggggctcctgtggccgtggccggggcgccagtcttcctgcggcccctgaagaacgcggcggtgtgcgcgggcagcgacgtgcggctgcgggtggtggtgagcgggacgccccagcccagcctccgctggttccgggatgggcagctcctgcccgcgccggcccccgagcccagctgcctgtggctgcggcgctgcggggcgcaggacgccggcgtgtacagctgcatggcccagaacgagcggggccgggcctcctgcgaggcggtgctcacagtgctggaggtcggagactcagagacggctgaggatgacatcagcgatgtgcagggaacccagcgcctggagcttcgggatgacggggccttcagcacccccacggggggttctgacaccctggtgggcacctccctggacacacccccgacctccgtgacaggcacctcagaggagcaagtgagctggtggggcagcgggcagacggtcctggagcaggaagcgggcagtgggggtggcacccgccgcctcccgggcagcccaaggcaagcacaggcaaccggggccgggccacggcacctgggggtggagccgctggtgcgggcatctcgagctaatctggtgggcgcaagctgggggtcagaggatagcctttccgtggccagtgacctgtacggcagcgcattcagcctgtacagaggacgggcgctctctatccacgtcagcgtccctcagagcgggttgcgcagggaggagcccgaccttcagcctcaactggccagcgaagccccacgccgccctgcccagccgcctccttccaaatccgcgctgctccccccaccgtcccctcgggtcgggaagcggtccccgccgggacccccggcccagcccgcggccacccccacgtcgccccaccgtcgcactcaggagcctgtgctgcccgaggacaccaccaccgaagagaagcgagggaagaagtccaagtcgtccgggccctccctggcgggcaccgcggaatcccgaccccagacgccactgagcgaggcctcaggccgcctgtcggcgttgggccgatcgcctaggctggtgcgcgccggctcccgcatcctggacaagctgcagttcttcgaggagcgacggcgcagcctggagcgcagcgactcgccgccggcgcccctgcggccctgggtgcccctgcgcaaggcccgctctctggagcagcccaagtcggagcgcggcgcaccgtggggcacccccggggcctcgcaggaagaactgcgggcgccaggcagcgtggccgagcggcgccgcctgttccagcagaaagcggcctcgctggacgagcgcacgcgtcagcgcagcccggcctcagacctcgagctgcgcttcgcccaggagctgggccgcatccgccgctccacgtcgcgggaggagctggtgcgctcgcacgagtccctgcgcgccacgctgcagcgtgccccatcccctcgagagcccggcgagcccccgctcttctctcggccctccacccccaagacatcgcgggccgtgagccccgccgccgcccagccgccctctccgagcagcgcggagaagccgggggacgagcctgggaggcccaggagccgcgggccggcgggcaggacagagccgggggaaggcccgcagcaggaggttaggcgtcgggaccaattcccgctgacccggagcagagccatccaggagtgcaggagccctgtgccgccccccgccgccgatcccccagaggccaggacgaaagcaccccccggtcggaagcgggagcccccggcgcaggccgtgcgcttcctgccctgggccacgccgggcctggagggcgctgctgtaccccagaccttggagaagaacagggcggggcctgaggcagagaagaggcttcgcagagggccggaggaggacggtccctgggggccctgggaccgccgaggggcccgcagccagggcaaaggtcgccgggcccggcccacctcccctgagctcgagtcttcggatgactcctacgtgtccgctggagaagagcccctagaggcccctgtgtttgagatccccctgcagaatgtggtggtggcaccaggggcagatgtgctgctcaagtgtatcatcactgccaaccccccgccccaagtgtcctggcacaaggatgggtcagcgctgcgcagcgagggccgcctcctcctccgggctgagggtgagcggcacaccctgctgctcagggaggccagggcagcagatgccgggagctatatggccaccgccaccaacgagctgggccaggccacctgtgccgcctcactgaccgtgagacccggtgggtctacatcccctttcagcagccccatcacctccgacgaggaatacctgagccccccagaggagttcccagagcctggggagacctggccgcgaacccccaccatgaagcccagtcccagccagaaccgccgttcttctgacactggctccaaggcaccccccaccttcaaggtctcacttatggaccagtcagtaagagaaggccaagatgtcatcatgagcatccgcgtgcagggggagcccaagcctgtggtctcctggctgagaaaccgccagcccgtgcgcccagaccagcggcgctttgcggaggaggctgagggtgggctgtgccggctgcggatcctggctgcagagcgtggcgatgctggtttctacacttgcaaagcggtcaatgagtatggtgctcggcagtgcgaggcccgcttggaggtccgagcacaccctgaaagccggtccctggccgtgctggcccccctgcaggacgtggacgtgggggccggggagatggcgctgtttgagtgcctggtggcggggcccactgacgtggaggtggattggctgtgccgtggccgcctgctgcagcctgcactgctcaaatgcaagatgcatttcgatggccgcaaatgcaagctgctacttacatctgtacatgaggacgacagtggcgtctacacctgcaagctcagcacggccaaagatgagctgacctgcagtgcccggctgaccgtgcggccctcgttggcacccctgttcacacggctgctggaagatgtggaggtgttggagggccgagctgcccgtttcgactgcaagatcagtggcaccccgccccctgttgttacctggactcattttggctgccccatggaggagagtgagaacttgcggctgcggcaggacgggggtctgcactcactgcacattgcccatgtgggcagcgaggacgaggggctctatgcggtcagtgctgttaacacccatggccaggcccactgctcagcccagctgtatgtagaagagccccggacagccgcctcaggccccagctcgaagctggagaagatgccatccattcccgaggagccagagcagggtgagctggagcggctgtccattcctgacttcctgcggccactgcaggacctggaggtgggactggccaaggaggccatgctagagtgccaggtgaccggcctgccctaccccaccatcagctggttccacaatggccaccgcatccagagcagcgacgaccggcgcatgacacagtacagggatgtccatcgcttggtgttccctgccgtggggcctcagcacgccggtgtctacaagagcgtcattgccaacaagctgggcaaagctgcctgctatgcccacctgtatgtcacagatgtggtcccaggccctccagatggcgccccgcaggtggtggctgtgacggggaggatggtcacactcacatggaacccccccaggagtctggacatggccatcgacccggactccctgacgtacacagtgcagcaccaggtgctgggctcggaccagtggacggcactggtcacaggcctgcgggagccagggtgggcagccacagggctgcgtaagggggtccagcacatcttccgggtcctcagcaccactgtcaagagcagcagcaagccctcacccccttctgagcctgtgcagctgctggagcacggcccaaccctggaggaggcccctgccatgctggacaaaccagacatcgtgtatgtggtggagggacagcctgccagcgtcaccgtcacattcaaccatgtggaggcccaggtcgtctggaggagctgccgaggggccctcctagaggcacgggccggtgtgtacgagctgagccagccagatgatgaccagtactgtcttcggatctgccgggtgagccgccgggacatgggggccctcacctgcaccgcccgaaaccgtcacggcacacagacctgctcggtcacattggagctggcagaggcccctcggtttgagtccatcatggaggacgtggaggtgggggctggggaaactgctcgctttgcggtggtggtcgagggaaaaccactgccggacatcatgtggtacaaggacgaggtgctgctgaccgagagcagccatgtgagcttcgtgtacgaggagaatgagtgctccctggtggtgctcagcacgggggcccaggatggaggcgtctacacctgcaccgcccagaacctggcgggtgaggtctcctgcaaagcagagttggctgtgcattcagctcagacagctatggaggtcgagggggtcggggaggatgaggaccatcgaggaaggagactcagcgacttttatgacatccaccaggagatcggcaggggtgctttctcctacttgcggcgcatagtggagcgtagctccggcctggagtttgcggccaagttcatccccagccaggccaagccaaaggcatcagcgcgtcgggaggcccggctgctggccaggctccagcacgactgtgtcctctacttccatgaggccttcgagaggcgccggggactggtcattgtcaccgagctctgcacagaggagctgctggagcgaatcgccaggaaacccaccgtgtgtgagtctgagatccgggcctatatgcggcaggtgctagagggaatacactacctgcaccagagccacgtgctgcacctcgatgtcaagcctgagaacctgctggtgtgggatggtgctgcgggcgagcagcaggtgcggatctgtgactttgggaatgcccaggagctgactccaggagagccccagtactgccagtatggcacacctgagtttgtagcacccgagattgtcaatcagagccccgtgtctggagtcactgacatctggcctgtgggtgttgttgccttcctctgtctgacaggaatctccccgtttgttggggaaaatgaccggacaacattgatgaacatccgaaactacaacgtggccttcgaggagaccacattcctgagcctgagcagggaggcccggggcttcctcatcaaagtgttggtgcaggaccggctgagacctaccgcagaagagaccctagaacatccttggttcaaaactcaggcaaagggcgcagaggtgagcacggatcacctgaagctattcctctcccggcggaggtggcagcgctcccagatcagctacaaatgccacctggtgctgcgccccatccccgagctgctgcgggcccccccagagcgggtgtgggtgaccatgcccagaaggccaccccccagtggggggctctcatcctcctcggattctgaagaggaagagctggaagagctgccctcagtgccccgcccactgcagcccgagttctctggctcccgggtgtccctcacagacattcccactgaggatgaggccctggggaccccagagactggggctgccacccccatggactggcaggagcagggaagggctccctctcaggaccaggaggctcccagcccagaggccctcccctccccaggccaggagcccgcagctggggctagccccaggcggggagagctccgcaggggcagctcggctgagagcgccctgccccgggccgggccgcgggagctgggccggggcctgcacaaggcggcgtctgtggagctgccgcagcgccggagccccagcccgggagccacccgcctggcccggggaggcctgggtgagggcgagtatgcccagaggctgcaggccctgcgccagcggctgctgcggggaggccccgaggatggcaaggtcagcggcctcaggggtcccctgctggagagcctggggggccgtgctcgggacccccggatggcacgagctgcctccagcgaggcagcgccccaccaccagcccccactcgagaaccggggcctgcaaaagagcagcagcttctcccagggtgaggcggagccccggggccggcaccgccgagcgggggcgcccctcgagatccccgtggccaggcttggggcccgtaggctacaggagtctccttccctgtctgccctcagcgaggcccagccatccagccctgcacggcccagcgcccccaaacccagtacccctaagtctgcagaaccttctgccaccacacctagtgatgctccgcagccccccgcaccccagcctgcccaagacaaggctccagagcccaggccagaaccagtccgagcctccaagcctgcaccacccccccaggccctgcaaaccctagcgctgcccctcacaccctatgctcagatcattcagtccctccagctgtcaggccacgcccagggcccctcgcagggccctgccgcgccgccttcagagcccaagccccacgctgctgtctttgccagggtggcctccccacctccgggagcccccgagaagcgcgtgccctcagccgggggtcccccggtgctagccgagaaagcccgagttcccacggtgccccccaggccaggcagcagtctcagtagcagcatcgaaaacttggagtcggaggccgtgttcgaggccaagttcaagcgcagccgcgagtcgcccctgtcgctggggctgcggctgctgagccgttcgcgctcggaggagcgcggccccttccgtggggccgaggaggaggatggcatataccggcccagcccggcggggaccccgctggagctggtgcgacggcctgagcgctcacgctcggtgcaggacctcagggctgtcggagagcctggcctcgtccgccgcctctcgctgtcactgtcccagcggctgcggcggacccctcccgcgcagcgccacccggcctgggaggcccgcggcggggacggagagagctcggagggcgggagctcggcgcggggctccccggtgctggcgatgcgcaggcggctgagcttcaccctggagcggctgtccagccgattgcagcgcagtggcagcagcgaggactcggggggcgcgtcgggccgcagcacgccgctgttcggacggcttcgcagggccacgtccgagggcgagagtctgcggcgccttggccttccgcacaaccagttggccgcccaggccggcgccaccacgccttccgccgagtccctgggctccgaggccagcgccacgtcgggctcctcagccccaggggaaagccgaagccggctccgctggggcttctctcggccgcggaaggacaaggggttatcgccaccaaacctctctgccagcgtccaggaggagttgggtcaccagtacgtgcgcagtgagtcagacttccccccagtcttccacatcaaactcaaggaccaggtgctgctggagggggaggcagccaccctgctctgcctgccagcggcctgccctgcaccgcacatctcctggatgaaagacaagaagtccttgaggtcagagccctcagtgatcatcgtgtcctgcaaagatgggcggcagctgctcagcatcccccgggcgggcaagcggcacgccggtctctatgagtgctcggccaccaacgtactgggcagcatcaccagctcctgtaccgtggctgtggcccgagtcccaggaaagctagctcctccagaggtaccccagacctaccaggacacggcgctggtgctgtggaagccgggagacagccgggcaccttgcacgtatacgctggagcggcgagtggatggggagtctgtgtggcaccctgtgagctcaggcatccccgactgttactacaacgtgacccacctgccagttggcgtgactgtgaggttccgtgtggcctgtgccaaccgtgctgggcaggggcccttcagcaactcttctgagaaggtctttgtcaggggtactcaagattcttcagctgtgccatctgctgcccaccaagaggcccctgtcacctcaaggccagccagggcccggcctcctgactctcctacctcactggccccacccctagctcctgctgcccccacacccccgtcagtcactgtcagcccctcatctccccccacacctcctagccaggccttgtcctcgctcaaggctgtgggtccaccaccccaaacccctccacgaagacacaggggcctgcaggctgcccggccagcggagcccaccctacccagtacccacgtcaccccaagtgagcccaagcctttcgtccttgacactgggaccccgatcccagcctccactcctcaaggggttaaaccagtgtcttcctctactcctgtgtatgtggtgacttcctttgtgtctgcaccaccagcccctgagcccccagcccctgagccccctcctgagcctaccaaggtgactgtgcagagcctcagcccggccaaggaggtggtcagctcccctgggagcagtccccgaagctctcccaggcctgagggtaccactcttcgacagggtccccctcagaaaccctacaccttcctggaggagaaagccaggggccgctttggtgttgtgcgagcgtgccgggagaatgccacggggcgaacgttcgtggccaagatcgtgccctatgctgccgagggcaagcggcgggtcctgcaggagtacgaggtgctgcggaccctgcaccacgagcggatcatgtccctgcacgaggcctacatcacccctcggtacctcgtgctcattgctgagagctgtggcaaccgggaactcctctgtgggctcagtgacaggttccggtattctgaggatgacgtggccacttacatggtgcagctgctacaaggcctggactacctccacggccaccacgtgctccacctagacatcaagccagacaacctgctgctggcccctgacaatgccctcaagattgtggactttggcagtgcccagccctacaacccccaggcccttaggccccttggccaccgcacgggcacgctggagttcatggctccggagatggtgaagggagaacccatcggctctgccacggacatctggggagcgggtgtgctcacttacattatgctcagtggacgctccccgttctatgagccagacccccaggaaacggaggctcggattgtggggggccgctttgatgccttccagctgtaccccaatacatcccagagcgccaccctcttcttgcgaaaggttctctctgtacatccctggagccggccctccctgcaggactgcctggcccacccatggttgcaggacgcctacctgatgaagctgcgccgccagacgctcaccttcaccaccaaccggctcaaggagttcctgggcgagcagcggcggcgccgggctgaggctgccacccgccacaaggtgctgctgcgctcctaccctggcggcccctag

SEQ ID NO: 261 - DNA, 1662 bp, Homo Sapiens
atggcggccccggcaggcggcggaggctccgcggtgtcggtgctggccccgaacggccggcgccacacggtgaaggtgacgccgagcaccgtgctgcttcaggttctggaggacacgtgccggcggcaggacttcaacccctgtgaatatgatctgaagtttcagaggagcgtgctcgacctttctctccagtggagatttgccaacctgcccaacaatgccaagctggagatggtgcccgcttcccggagccgtgaggggcctgagaacatggttcgcatcgctttgcagctggacgatggctcgaggttgcaggactctttctgttcaggccagaccctctgggagcttctcagccattttccacagatcagggagtgcctgcagcaccccggcggggccaccccagtctgcgtgtacacgagggatgaggtgacgggtgaagctgccctgcggggcacgacgctgcagtcgctgggcctgaccgggggcagcgccaccatcaggtttgtcatgaagtgctacgaccccgtgggcaagaccccaggaagcctgggctcgtcagcgtcggctggccaggcagccgccagcgctccacttcccttggaatctggggagctcagccgcggcgacttgagccgtccggaggacgcggacacctcagggccctgctgcgagcacactcaggagaagcagagcacaagggcacccgcagctgccccctttgttcctttctcgggtgggggacagagactggggggccctcctgggcccacgaggcctctgacatcatcttcagctaagttgccgaagtccctctccagccctggaggcccctccaagccaaagaagtccaagtcgggccaggatccccagcaggagcaggagcaggagcgggagcgggatccccagcaggagcaggagcgggagcggcccgtggaccgggagcccgtggaccgggagccggtggtgtgccaccccgacctggaggagcggctgcaggcctggccagcggagctgcctgatgagttctttgagctgacggtggacgacgtgagaagacgcttggcccagctcaagagtgagcggaagcgcctggaagaagcccccttggtgaccaaggccttcagggaggcgcagataaaggagaagctggagcgctacccaaaggtggctctgagggtcctgttccccgaccgctacgtcctacagggcttcttccgccccagcgagacagtgggggacttgcgagacttcgtgaggagccacctggggaaccccgagctgtcattttacctgttcatcacccctccaaaaacagtcctggacgaccacacgcagaccctctttcaggcgaacctcttcccggccgctctggtgcacttgggagccgaggagccggcaggtgtctacctggagcctggcctgctggagcatgccatctccccatctgcggccgacgtgctggtggccaggtacatgtccagggccgccgggtccccttccccattgccagcccctgaccctgcacctaagtctgagccagctgctgaggagggggcgctggtcccccctgagcccatcccagggacggcccagcccgtgaagaggagcctgggcaaggtgcccaagtggctgaagctgccggccagcaagaggtga

SEQ ID NO: 262 - DNA, 1716 bp, Homo Sapiens
atgactatactccccaaaaagaagccgccgcctcccgacgccgaccccgccaacgagccgccgccgcccgggccgatgcccccggcgccgcggcgcggcggaggtgtgggcgtgggcggcggcggcacgggcgtgggcggcggcgatcgcgaccgtgactccggcgtcgtgggggcccgtccgcgagcttcgccaccgcctcaaggcccgctaccaggaccgccgggcgctcttcatcgctgggcgctggccgtgccgcctggtgcagtggcgggtccccggccacaacaggcttctccacctccttgcgggggcccaggtggtcccggcggcggtcccggcgacgcgctgggcgcagcggcggcgggtgtgggtgccgcgggcgtggtggtgggtgtgggtggtgccgtaggcgtgggcggctgctgctccgggcctgggcacagcaagcggcgacgtcaagctcccggggttggcgcggttggcgggggcagtcccgagcgtgaggaggtcggcgcaggctacaacagtgaggacgagtatgaggcggctgcagcacgcatcgaggctatggaccctgccactgtcgagcagcaggagcattggtttgaaaaggccctacgagacaagaagggcttcatcatcaagcagatgaaggaggatggcgcctgtctcttccgggctgtagctgaccaggtgtatggagaccaggacatgcatgaggttgtgcgaaagcattgcatggactatctgatgaagaatgccgactacttctccaactatgtcacagaggactttaccacctacattaacaggaagcggaaaaacaattgccatggcaaccacattgagatgcaggccatggcagagatgtacaaccgtcctgtggaggtgtaccagtacagcacaggtacttctgcagtggaacccatcaacacattccatgggatacatcaaaacgaggacgaacccattcgtgttagctaccatcggaatatccactataattcagtggtgaatcctaacaaggccaccattggtgtggggctgggcctgccatcattcaaaccagggtttgcagagcagtctctgatgaagaatgccataaaaacatcggaggagtcatggattgaacagcagatgctagaagacaagaaacgggccacagactgggaggccacaaatgaagccatcgaggagcaggtggctcgggaatcctacctgcagtggttgcgggatcaggagaaacaggctcgccaggtccgaggccccagccagccccggaaagccagcgccacatgcagttcggccacagcagcagcctccagtggcctggaggagtggactagccggtccccgcggcagcggagttcagcctcgtcacctgagcaccctgagctgcatgctgaattgggcatgaagcccccttccccaggcactgttttagctcttgccaaacctccttcgccctgtgcgccaggtacaagcagtcagttctcggcaggggccgaccgggcaacttccccccttgtgtccctctaccctgctttggagtgccgggccctcattcagcagatgtccccctctgcctttggtctgaatgactgggatgatgatgagatcctagcttcggtgctggcagtgtcccaacaggaatacctagacagtatgaagaaaaacaaagtgcacagagacccgcccccagacaagagttga

SEQ ID NO: 263 - DNA, 3840 bp, Homo Sapiens
atgaccctgactgaaaggctgcgtgagaagatatctcgggccttctacaaccatgggctcctctgtgcatcctatcccatccccatcatcctcttcacagggttctgcatcttagcctgctgctacccactgctgaaactccccttgccaggaacaggacctgtggaattcaccacccctgtgaaggattactcgcccccacctgtggactctgaccgcaaacaaggagagcctactgagcagcctgagtggtatgtgggtgccccggtggcttatgtccagcagatatttgtgaagtcctcagtgtttccctggcacaagaacctcctggcagtagatgtatttcgttcacctttgtcccgggcattccaactggtggaggagatccggaaccacgtgctgagagacagctctgggatcaggagcttggaggagttgtgtctgcaagtgaccgacctgctgccaggccttaggaagctcaggaacctactccctgagcatggatgcctgctgctgtcccctgggaacttctggcagaatgactgggaacgcttccatgctgatcctgacatcattgggaccatccaccagcacgagcctaaaaccctgcagacttcagccacactcaaagacttgttatttggtgttcctgggaagtacagcggggtgagcctctacaccaggaagaggatggtctcctacaccatcaccctggtcttccagcactaccatgccaagttcctgggcagcctgcgtgcccgcctgatgcttctgcaccccagccccaactgcagccttcgggcggagagcctggtccacgtgcacttcaaggaggagattggtgtcgctgagctcatcccccttgtgaccacctacatcatcttgtttgcctacatctacttctccacgcggaagatcgacatggtcaagtccaagtgggggctggccctggctgccgtggtcacagtgctcagctcgctgctcatgtctgtgggactctgcacactcttcggcctgacgcccaccctcaatggcggcgagattttcccctaccttgtggtggttattgggttagagaatgtgttggtgctcaccaagtctgtggtctcaaccccggtagacctggaggtgaagctgcggatcgcccaaggcctaagcagcgagagctggtccatcatgaagaacatggccacggagctgggcatcatcctcatcggctacttcaccctagtgcccgccatccaggagttctgtctctttgctgtcgtggggctggtgtctgacttcttccttcagatgctgtttttcaccactgtcctgtccattgacattcgccggatggagctagcagacctgaacaagcgactgccccctgaggcctgcctgccctcagccaagccagtgggacagccaacgcgctacgagcggcagctggctgtgaggccgtccacaccccacaccatcacgttgcagccgtcttccttccgaaacctgcggctccccaagaggctgcgtgttgtctacttcctggcccgcacccgcctggcacagcgcctcatcatggctggcaccgttgtctggattggcatcctggtatacacagacccagcagggctgcgcaactacctcgctgcccaggtgacggaacagagcccattgggtgagggagccctggctcccatgcccgtgcctagtggcatgctgccccccagccacccggaccctgccttctccatcttcccacctgatgcccctaagctacctgagaaccagacgtcgccaggcgagtcacctgagcgtggaggtccagcagaggttgtccatgacagcccagtcccagaggtaacctgggggcctgaggatgaggaactttggaggaaattgtccttccgccactggccgacgctcttcagctattacaacatcacactggccaagaggtacatcagcctgctgcccgtcatcccagtcacgctccgcctgaacccgagggaggctctggagggccggcaccctcaggacggccgcagtgcctggcccccaccggggcccatacctgctgggcactgggaagcaggacccaagggcccaggtggggtgcaggcccatggagacgtcacgctgtacaaggtggcggcgctgggcctggccaccggcatcgtcttggtgctgctgctgctctgcctctaccgcgtgctatgcccgcgcaactacgggcagctgggtggtgggcccgggcggcggaggcgcggggagctgccctgcgacgactacggctatgcgccacccgagacggagatcgtgccgcttgtgctgcgcggccacctcatggacatcgagtgcctggccagcgacggcatgctgctggtgagctgctgcctggcaggccacgtctgcgtgtgggacgcgcagaccggggattgcctaacgcgcattccgcgcccaggcaggcagcgccgggacagtggcgtgggcagcgggcttgaggctcaggagagctgggaacgactttcagatggtgggaaggctggtccagaggagcctggggacagccctcccctgagacaccgcccccggggccctccgccgccttccctcttcggggaccagcctgacctcacctgcttaattgacaccaacttttcagcgcagcctcggtcctcacagcccactcagcccgagccccggcaccgggcggtctgtggccgctctcgggactccccaggctatgacttcagctgcctggtgcagcgggtgtaccaggaggaggggctggcggccgtctgcacaccagccctgcgcccaccctcgcctgggccggtgctgtcccaggcccctgaggacgagggtggctcccccgagaaaggctccccttccctcgcctgggcccccagtgccgagggttccatctggagcttggagctgcagggcaacctcatcgtggtggggcggagcagcggccggctggaggtgtgggacgccattgaaggggtgctgtgctgcagcagcgaggaggtctcctcaggcattaccgctctggtgttcttggacaaaaggattgtggctgcacggctcaacggttcccttgatttcttctccttggagacccacactgccctcagccccctgcagtttagagggaccccagggcggggcagttcccctgcctctccagtgtacagcagcagcgacacagtggcctgtcacctgacccacacagtgccctgtgcacaccaaaaacccatcacagccctgaaagccgctgctgggcgcttggtgactgggagccaagaccacacactgagagtgttccgtctggaggactcgtgctgcctcttcacccttcagggccactcaggggccatcacgaccgtgtacattgaccagaccatggtgctggccagtggaggacaagatggggccatctgcctgtgggatgtactgactggcagccgggtcagccatgtgtttgctcaccgtggggatgtcacctcccttacctgtaccacctcctgtgtcatcagcagtggcctggatgacctcatcagcatctgggaccgcagcacaggcatcaagttctactccattcagcaggacctgggctgtggtgcaagcttgggtgtcatctcagacaacctgctggtgactggcggccagggctgtgtctccttttgggacctaaactacggggacctgttacagacagtctacctggggaagaacagtgaggcccagcctgcccgccagatcctggtgctggacaacgctgccattgtctgcaactttggcagtgagctcagcctggtgtatgtgccctctgtgctggagaagctggactga

SEQ ID NO: 264 - DNA, 1284 bp, Homo Sapiens
atggcagcgaccgatatagctcgccaggtgggtgaaggttgccgaactgtccccctggctggacatgtggggtttgacagcttgcctgaccagctggtgaataagtccgtcagccagggcttctgcttcaacatcctgtgcgtgggagagacaggtttgggcaagtccaccctcatggacaccctgttcaacaccaaattcgaaggggagccagccacccacacacagccgggtgtccagctccagtctaatacctatgacctccaagagagcaacgtgaggctaaagctcacgatcgttagcacagttggctttggggaccagatcaacaaagaggacagctacaagcctatcgtggaattcatcgatgcacaattcgaggcctacctgcaggaagagctaaagatccgaagagtgctacacacctaccatgactcccgaatccatgtctgcttgtatttcattgcccccacgggtcattccctgaagtctctggacctagtgactatgaagaagctggacagtaaggtgaacatcatccccatcattgccaaagcagatgccatttcgaagagtgagctaacaaagttcaaaatcaaaatcaccagcgagcttgtcagcaacggagtccagatctatcagtttcctacagatgatgagtcggtggcagagatcaatggaaccatgaacgcccacctgccgtttgctgtcattggcagcacagaagaactgaagataggcaacaagatgatgagggcgcggcagtatccttggggcactgtgcaggttgaaaacgaggcccactgcgactttgtgaagctgcgggagatgctgattcgggtcaacatggaggatctgcgggagcagacccacacccggcactatgagctgtatcgccgctgtaagctggaggagatgggcttcaaggacaccgaccctgacagcaaacccttcagtttacaggagacatatgaggccaaaaggaacgagttcctaggggaactccagaaaaaagaagaggagatgagacagatgttcgtccagcgagtcaaagagaaagaagcggagctcaaagaggcagagaaagagctgcacgagaagtttgaccgtctgaagaaactgcaccaggacgagaagaagaaactggaggataagaagaaatccctggatgatgaagtgaatgctttcaagcaaagaaagacggcggctgagctgctccagtcccagggctcccaggctggaggctcacagactctgaagagagacaaagagaagaaaaattaa

SEQ ID NO: 265 - DNA, 1422 bp, Homo Sapiens
atgccaaagctgcagggcttcgagttctggagccgcaccctgcgaggggcccgccacgtcgtggcccccatggtggaccagagcgagctggcctggaggctgctgagccggcgccacggggcacagctctgctacacgcccatgctgcatgcccaggtctttgtccgcgacgccaactaccggaaggagaacctgtactgcgaggtgtgccccgaggaccggcccctcatcgtgcagttctgtgccaatgacccggaggtgtttgttcaggcggctctcctggctcaggattactgtgacgccattgacctgaacttgggctgcccacagatgatagccaagagaggtcactatggcgcctttctgcaggacgagtgggacctgctccaaagaatgattttgctggcccacgagaaactctctgttcctgtcacgtgcaaaatccgtgtcttcccggagattgacaagaccgtgaggtacgcccagatgctggagaaggccggctgccagttgctgacggtgcacggacgcaccaaggagcagaaggggcccctgtcgggtgcagcgtcctgggagcatatcaaggctgtgcggaaggctgtggccatccctgtgtttgctaacgggaacatccagtgcctgcaggacgtggagcgctgcctccgggacacgggtgtgcagggcgtcatgagcgcagagggcaacctgcacaaccccgccctgttcgagggccggagccctgccgtgtgggagctggccgaggagtatctggacatcgtgcgggagcacccctgccccctgtcctacgtccgggcccacctcttcaagctgtggcaccacacgctgcaggtgcaccaggagctgcgagaggagctggccaaggtgaagaccctggagggcatcgctgctgtgagccaggagctgaagctgcggtgtcaggaggagatatccaggcaggagggagcgaagcccaccggcgacttgcccttccactggatctgccagccctacatccggccggggcccagggaggggagcaaggagaaggcaggtgcgcgcagcaagcgggccctggaggaagaggagggtggcacggaggtcctgtccaagaacaagcaaaagaagcagctgaggaacccccacaagaccttcgacccctctctgaagccaaaatatgcaaagtgtgaccagtgtggaaacccaaagggcaacagatgtgtgttcagcctgtgccgcggctgctgcaagaagcgagcctccaaagagactgcagactgcccaggtcacggattgctttttaaaaccaaattggagaagtctctggcctggaaagaggcccagcctgagctgcaggagcctcagccagcagcacctggaacaccaggtggcttctccgaagtcatgggcagtgccctggcctga

SEQ ID NO: 266 - DNA, 780 bp, Homo Sapiens
atgccgggagctaactaccgcgccggggccggggccggggccggggcccgacgtccccgcggggcccgggaccgcgaggaggacggcgggggcctggagcccgcggccgtggcccgcgacctattgaggggcacatctaacatgtcatttgaggagctgttggaattgcagagccaagtggggactaagacgtacaaacaattggtagctggaaatagtcctaagaaacaagcttctagaccacctatccaaaatgcatgtgttgcagataagcacaggcctctggaaatgtcagccaagatccgagtaccatttttacgtcaggttgttcccattagtaaaaaggtagcccgggaccctcgctttgatgatctgtcaggggaatataatcctgaggtgtttgacaaaacataccaattcttgaatgacatccgagcgaaagagaaagagcttgtgaaaaaacagttgaagaagcacctttcaggagaggagcatgagaaactgcagcaactgcttcagcgaatggagcagcaagaaatggcacagcaggaacgaaagcaacagcaggagctgcacctggccctgaagcaagaacgtcgggctcaggcccagcagggccatcggccatacttcctgaaaaaatctgagcagcgccagttggcactagctgagaagttcaaggagctgaaacgcagcaagaaattggagaacttcttgagtcgaaagaggcgacgaaatgcaggcaaggacaggagacatctccctttgagcaaagagtaa

SEQ ID NO: 267 - DNA, 1674 bp, Homo Sapiens
atggcgggtgcggggctgcgggcggccgctcggcgctggctgctgtgcggaggccacggcgggccgcgagccgcctcgtcctcgccctcctgccctgggtgcggccccccgggtcccggcgcccactgccccggcgtcccgcgctccgcgcccgcccaggcacccaccagcggcgccgacctcagcgcgcacctatgggctcgctaccaggacatgcggagactggtgcacgacctcctgccccccgaggtctgcagtctcctgaacccagcagccatctacgccaacaacgagatcagcctgcgtgacgttgaggtctacggctttgactacgactacaccctggcccagtatgcagacgcactgcaccccgagatcttcagtaccgcccgtgacatcctgatcgagcactacaagtacccagaagggattcggaagtatgactacaaccccagctttgccatccgtggcctccactatgacattcagaagagccttctgatgaagattgacgccttccactacgtgcagctggggacagcctacaggggcctccagcctgtgccagacgaggaggtgattgagctgtatgggggtacccagcacatcccactataccagatgagtggcttctatggcaagggtccctccattaagcagttcatggacatcttctcgctaccggagatggctctgctgtcctgtgtggtggactactttctgggccacagcctggagtttgaccaagcacatctctacaaggacgtgacggacgccatccgagacgtgcatgtgaagggcctcatgtaccagtggatcgagcaggacatggagaagtacatcctgagaggggatgagacgtttgctgtcctgagccgcctggtggcccatgggaaacagctgttcctcatcaccaacagtcctttcagcttcgtagacaaggggatgcggcacatggtgggtcccgattggcgccagctcttcgatgtggtcattgtccaggcagacaagcccagcttcttcactgaccggcgcaagcctttcagaaaactcgatgagaagggctcacttcagtgggaccggatcacccgcttggaaaagggcaagatctatcggcagggaaacctgtttgacttcttacgcttgacggaatggcgtggcccccgcgtgctctacttcggggaccacctctatagtgatctggcggatctcatgctgcggcacggctggcgcacaggcgccatcatccccgagctggagcgtgagatccgcatcatcaacacggagcagtacatgcactcgctgacgtggcagcaggcgctcacggggctgctggagcgcatgcagacctatcaggacgcggagtcgaggcaggtgctggctgcctggatgaaagagcggcaggagctgaggtgcatcaccaaggccctgttcaatgcgcagttcggcagcatcttccgcaccttccacaaccccacctacttctcaaggcgcctcgtgcgcttctctgacctctacatggcctccctcagctgcctgctcaactaccgcgtggacttcaccttctacccacgccgtacgccgctgcagcacgaggcacccctctggatggaccagctctgcaccggctgcatgaagacccccttccttggtgacatggcccacatccgctga

SEQ ID NO: 268 - DNA, 2179 bp, Homo Sapiens
atgagtgagtggctgcccatagtggcttcttccatcgtatccttgtacttcctggagctgaccgacctcttcaagccggccaaggtgggcttccagtgctatgaccgcactctctccatgccctacgtggagaccaacgaggagctcatcccgctgctgatgctgctcagcttggccttcgcggcccctgccgcctcgatcatggtggccgagggcatgttgtactgtctgcagtcccggctgtggggccgtgccggggggcccgccggggcggagggcagcatcaacgccggcggctgcaacttcaactccttcctgcggcgtacggtgcggtttgtggggggtgtccacgtgttcggcctgtgtgccacagccctggtgacggacgtgatccagctggccacgggttaccacactcccttcttcctcaccgtctgcaagcccaactacactctcctgggcacgtcctgcgaggtcaacccctacatcacgcaggacatctgctccggccacgacatccacgccatcctgtctgcacggaagaccttcccgtcccagcacgccacgctgtcagccttcgccgcggtctatgtgtcgatgtacttcaactcggtcatctcggacaccaccaagctgctgaagcccatcctggtcttcgcctttgccatcgccgcgggcgtatgcgggctcacgcagatcacgcagtaccgcagccaccctgtggacgtgtatgccggcttcctcatcggggcgggcatcgctgcctacctggcctgccacgcggtgggcaacttccaggccccacctgcagagaagcccgcggccccggcccccgccaaggacgcgctgcgggccctgacgcagcggggccacgactcggtttatcagcagaataagtcggtgagcaccgacgagctggggcccccagggcggctggagggcgcgccccggcccgtggcccgcgagaagacctcgctgggcagcctgaagcgcgccagcgtggacgtggacctgctggccccgcgcagccccatggccaaggagaacatggtgaccttcagccacacgctgcccagggccagcgcgccctcgctggacgaccccgcgcgccgccacatgaccatccacgtgccgctggacgcctcgcgctccaagcagctcatcagcgagtggaagcagaagagcctggagggccgcggcctggggctgcccgacgacgccagccccgggcacctgcgcgcgcccgccgaacccatggcggaggaggaggaagaggaggaggacgaagaggaagaggaggaggaggaagaggaggaggacgagggcccggccccgccctcgctctaccccaccgtgcaggcgcggccggggctggggcctcgggtcatcctcccaccgcgcgcggggccgccgccgctggtgcacatcccggaggagggcgcgcagacgggggccggcctgtcccccaaaagcggcgccggggtgcgcgccaagtggctcatgatggccgagaagagcggggcggcagtggccaaccctccgcggctgctgcaggtcatcgccatgtccaaggctccgggcgcgccgggccccaaggcggccgagacggcgtcgtcgtccagcgccagctccgactcctcgcagtaccggtcgccgtcggaccgcgactccgccagcatcgtgaccatcgacgcgcacgcgccgcaccaccccgtggtgcacctgtcggccggcggcgcgccctgggagtggaaggcggcgggcggcggggccaaggcggaggccgacggcggctacgagctgggggacctggcgcgcggcttccgcggcggggccaagcccccgggcgtgtcccccggctcgtcggtcagcgacgtggaccaggaggagccgcggttcggggccgtggccaccgtcaacctggccacgggcgaggggctgcccccgctgggcgcggccgatggggcgctgggcccgggcagccgggagtccacgctgcggcgccacgcgggcggcctggggctggcggagcgcgaggcggaggcggaggccgagggctacttccgcaagatgcaggcgcgccgcttccccgactagcgcggcggggccgggggcgggcggggggcgggccgagggcgcgggcggccgcgcggatgctcaataaagcggcagaaaccga

SEQ ID NO: 269 - DNA, 2958 bp, Homo Sapiens
atgatccgacacgccggggcgcccgcgcgcggggaccccacgggtccggttccagttgttggcaaaggagaggaagaggaagaggaagatggcatgcggctttgtctgccagccaacccgaaaaactgccttcctcaccgccggggcatcagcatcctggagaagctcatcaaaacatgcccggtgtggctgcagctgagtctgggccaggcagaggtggccaggatcctgcaccgggtggtggctgggatgttcctggttcgccgggacagcagctcgaagcagctggtgctctgtgtccactttccttctctgaacgaaagctcggccgaggtgctcgaatacaccattaaggaagaaaagtcgatattgtacctggaaggctcggctcttgtgtttgaggacatcttcagattgattgcgttctactgtgtcagtagagacttactgcccttcacactgcggctaccccaggccatccttgaggccagcagcttcacggaccttgagaccatcgccaacctgggtctgggtttctgggactcctcgctgaatcctccacaagaaagagggaagccagcagagcccccaagagaccgggcccccggattccccctagtctccagcctcaggcccacagcccatgacgcaaactgtgcctgtgaaatcgagctgtcggtaggaaatgaccgcctgtggtttgtgaatcctattttcatcgaggactgcagcagcgccctgcccaccgaccagccacctcttggaaattgccctgcacgccctttgccgcccacctctgatgccacctcacccacctccaggtgggccccacgccgcccaccaccccctcccccagtgctgcccctgcagccctgcagcccagcccagccccctgtgctccctgctcttgcccccgcccctgcctgtcctttgcccacctctcccccagtgcctgccccccacgtcacaccccatgccccaggtcccccagaccatccgaaccagccgcccatgatgacctgcgagagactcccatgccccactgcaggcctgggccccctcagggaggaagcgatgaagccaggggcagcctccagtcccttgcagcaggtccccgccccgccactgcctgcgaagaagaaccttcccactgcccctcccagacgccgcgtttccgagagggtgtccttagaagaccaaagtccggggatggcggcagagggggaccagctcagcctgcctccccaagggacctcagacggccctgaggacacgccccgggagagcacggagcaaggccaggacacagaggtgaaagccagcgatcctcacagcatgccagagctgcccaggacagccaaacaacccccagtcccgccccccaggaaaaaacggatctctcgacaactggcctcgaccctcccagctcccttagagaacgctgagctctgcacacaggcgatggccttggagacacccacgccgggtccacccagagagggccaaagccctgcttctcaggctgggactcagcaccctcctgcccaggccactgcccattcccagagctctccagagttcaagggctccctggcctccctctcagacagcttgggggtgtctgtcatggccaccgaccaggactcctactccaccagcagcacggaggaggagctggagcagttcagcagccccagcgtgaagaagaagccctccatgatcctgggcaaggctcggcaccggctgagctttgccagtttcagcagcatgttccacgctttcctctccaacaaccgcaagctgtacaagaaggtggtggagctggcgcaggacaagggctcgtactttggcagcctggtgcaggactacaaggtgtacagcctggagatgatggcgcgccagacctccagcacggagatgctgcaggagattcgcaccatgatgacccagctcaagagctacctgctgcagagcaccgagctcaaggccctggtggaccccgccctgcactccgaggaggagctcgaagcaattgtagagtctgccttgtacaaatgtgtcctgaagcccctgaaggaagccatcaactcatgcctgcatcagatccacagcaaggatggttcgctgcagcagctcaaggagaaccagttagtgatcctggccaccaccaccactgacctaggtgtgaccaccagcgtgccggaggtgcccatgatggagaagatcctgcagaagttcaccagcatgcacaaggcctactcacctgagaagaagatctccatcctgctcaagacctgcaaactcatctacgactccatggccctcggcaacccagggaagccctatggggcggatgacttcctgcctgtgctcatgtatgtgctggcccgcagcaacctcacggagatgcttctcaatgtggagtacatgatggagctcatggaccccgccctgcagctgggggagggttcctactatctgaccaccacctacggggccctggagcacatcaagagctacgacaagatcacggtgacccggcagctgagtgtggaggtgcaggactccatccaccgctgggagcgccggcgtactctcaacaaggcccgggcctcccgctcctccgtacaggacttcatctgcgtgtcgtacctggagcccgagcagcaggcgcggacgctggcgtcgcgggcggacacccaggcccaggcgctgtgcgcgcagtgcgcggagaagttcgcggtggagcggccgcaggcgcaccggctgttcgtgctggtggacgggcgctgcttccagctggcggacgacgcgctgccgcactgcatcaagggctacctgctgcgcagcgagcccaagcgcgacttccactttgtctaccggcccctggacggtggtggcggcggcggcggcgggagcccgccctgcctggtggtgcgggagcccaacttcctgtga

SEQ ID NO: 270 - DNA, 684 bp, Homo Sapiens
atggaaaaactcttcaatgaaaatgaaggaatgccttcgaatcaaggaaagatagacaatgaagaacagccaccgcacgagggaaagccagaagtagcttgtattctggaagacaagaagttagaaaacgagggaaacacagaaaacacgggcaagagagttgaggaaccgttaaaggataaagaaaagccagagagtgcgggaaaggcaaaaggagaaggaaagtcagagaggaagggaaagtcagagatgcagggaggatcaaagacagagggaaagccagagagagggggaagggcagagggtgaaggagagccagacagtgaaagagagccagagagtgagggagagccagaaagtgaaacaagggctgcaggaaagcgcccagctgaggatgatatacccaggaaagccaaaagaaaaaccaacaaggggctggctcagtacctcaagcaatataaggaagccatacatgatatgaatttcagcaatgaggacatgataagagaatttgacaacatggctagggtggaggataaaaggagaaaaagcaaacagaaattgggggcgtttttgtggatgcaaagaaatttacaggaccccttctatcctaggggtccaagggaattcaggggtggctgcagggccccacgaagggacactgaagacattccttatgtgtag

SEQ ID NO: 271 - DNA, 1653 bp, Homo Sapiens
atgagccacgggcccagcccccggctggccgagtccccgcagctgtccaagggcagcctcctgaccatcctgggcagcccgtcgccggagcgcatggggcctgccgactccttgccgcccacgccgcccagcggcacgccctcgcccgggccgccgcccgcactgcccctgccccccgcgcccgcgctgctggccgacggcgactgggagagccgcgaggagctgcggctgcgggagctggaggaggcgcgggcgcgggcggcgcagatggagaagaccatgcgctggtggtcggactgcactgccaattggcgcgagaaatggagcaaggtgcgcgctgagcgcaaccgcgcgcgcgaggaggtgcgccagctgcgccagcgcctggacgcgctcaccaaggagctggcgggcgcacggcgcgagcgccaagaggcgcagggcgagtgcgaggcacggggccgcgagctggcgcggctgaggggcgcccggggggtcgccgaccagacgcgcgacggccccgagccggaagcggagcgcgagccagtgcgtgacgtcgggtccgagaggccgccaggcagccaggaactggagctggtggagagcctgctgaagagcatgccagaggagtctgaggactgctgggaggcgcgcagcctgggggctgggggcccgcggggcagctcaggccgccaggagcgcagccggctaccctgggaggacacagctgccacggaggaggaggcctccaagttgaccgccctgcggctacggctggatgagtcccagaaggtgctgctcaaggagcgagaggataaactggcgttgagcaggaacattgagaagctagagggggagctcagccagtggaagatcaagtatgaggagctgagcaagaccaagcaggagatgctcaagcagctcagcatcctgaaggaggcgcaccaggacgagctgggccgcatgtctgaggacctggaagatgagctcggtgcacgctccagcatggaccggaaaatggccgagctgaggggcgagatggagcggctgcaggccgaaaacgctgcggagtggggccgccgggagcggctggagacagagaaactgggccttgagcgggagaacaagaagctgcgggcacaggtcggagacctggaggaggcgctggcccggcggcggcggcaaacagccagcgcactggactgcgacctgagggccagccaggccgcgctcttcgagaagaacaaggagctggcagacctgaagcatgtgcatggcaagctgaagaagcagttccaggagaaggtggcagagctggcacatgccaaccggcgggtggagcagcacgaggctgaggtgaagaagctgcggctgcgggtggaggagctcaagaaggagctggcccaggctgaggacgagctggacgaggcccacaaccaggcacgtaagctgcagcggtcgctggacgagcagacggagcagagcgagaacctgcaagtgcaactggagcacctgcagtccaggctccgcaggcagcagcagaacgctcccctcttcgggaagatccgcagtgctcgctttggcaccgaggaggccgaggatggaaccagtgacctggacgaggacgaggacctgcaaatccaggtggcctag

SEQ ID NO: 272 - DNA, 294 bp, Homo Sapiens
atgactaaaaagaagcgggagaatctgggcgtcgctctagagatcgatgggttagaggagaagctgtcccagtgtcggagagacctggaggccgtgaactccagactccacagccgggagctgagcccagaggccaggaggtccctggagaaggagaaaaacagcctaatgaacaaagcctccaactacgagaaggaactgaagtttcttcggcaagagaaccggaagaacatgctgctctctgtggccatctttatcctcctgacgctcgtctatgcctactggaccatgtga

SEQ ID NO: 273 - DNA, 2061 bp, Homo Sapiens
atgcagttaggggagcagctcttggtgagctcagtgaacctgcctggcgcgcacttctacccgctggagagtgcgcgaggcggcagcggcgggagcgctggccacctccccagcgcggccccctctcctcagaagttggacttagacaaagcgtccaagaagttttccggcagtctctcctgcgaggcggtgagcggggagcccgcagccgccagcgcaggggcccccgcggccatgcttagtgacaccgacgccggggacgcatttgccagcgctgcggcagtggccaagccggggcccccggacggccgcaagggctccccctgcggggaggaggagctgccctccgccgctgcagccgccgccgccgccgccgccgcggctgcggccactgcgcgctactccatggacagcctgagctccgagcggtactacctccagtcccccggtcctcaggggtcggagctggctgcgccctgctcactcttcccgtaccaggcggcggctggggcgccccacggacctgtgtacccggctcctaacggggcgcgctacccctacggctccatgctgccccccggcggcttccccgcggctgtgtgcccacccgggagggcgcagttcggcccaggagccggtgcgggcagtggcgcgggcggtagcagcggcgggggcggcggcccgggcacctatcagtacagccagggggctccgctctacgggccgtaccctggagccgcagcggcgggatcttgcggaggactggggggcctgggggttccaggttctggcttccgtgcccacgtctacctgtgcaaccggcctctgtggctcaaattccaccgccaccaaactgagatgatcattacgaaacagggcaggcgcatgtttcctttcttgagcttcaacataaacggactcaatcccactgcccactacaatgtgttcgtagaggtggtgctggcggaccccaaccactggcgcttccaggggggcaaatgggtgacctgtggcaaagccgacaataacatgcagggcaacaaaatgtatgttcacccagagtctcctaatactggttcccactggatgagacaggagatttcattcgggaaattaaaactcaccaataacaaaggcgcaaataacaacaacacccagatgatagtcttacaatccttacacaaataccaaccccgactgcatattgttgaagttacagaggatggcgtggaggacttgaatgagccctcaaagacccagacttttaccttctcagaaacgcaattcattgcagtgactgcctaccaaaacaccgatattactcaactaaagattgatcataacccctttgcaaaaggcttcagagacaactatgattcatcccatcagattgtccctggaggtcggtacggcgttcaatccttcttcccggagccctttgtcaacactttacctcaagcccgctattataatggcgagagaaccgtgccacagaccaacggcctcctttcaccccaacagagcgaagaggtggccaaccctccccagcggtggcttgtcacgcctgtccagcaacctgggaccaacaaactagacatcagttcctatgaatctgaatatacttctagcacattgctcccatatggcattaaatccttgccccttcagacatcccatgccctggggtattacccagacccaacctttcctgcaatggcagggtggggaggtcgaggttcttaccagaggaagatggcagctggactaccatggacctccagaacaagccccactgtgttctctgaagatcagctctccaaggagaaagtgaaagaggaaattggctcttcttggatagagacacccccttccatcaaatctctagattccaatgattcaggagtatacaccagtgcttgtaagcgaaggcggctgtctcctagcaactccagtaatgaaaattcaccctccataaagtgtgaggacattaatgctgaagagtatagtaaagacacctcaaaaggcatgggagggtattatgctttttacacaactccctaa

SEQ ID NO: 274 - DNA, 801 bp, Homo Sapiens
atgccgaaaggaaagaaggccaagggaaagaaggtggctccggccccagctgtcgtgaagaagcaggaggctaagaaagtggtgaatcccctgtttgagaaaaggcctaagaattttggcattggacaggacatccagcccaaaagagacctcacccgctttgtgaaatggccccgctatatcaggttgcagcggcagagagccatcctctataagcggctgaaagtgcctcctgcgattaaccagttcacccaggccctggaccgccaaacagctactcagctgcttaagctggcccacaagtacagaccagagacaaagcaagagaagaagcagagactgttggcccgggccgagaagaaggctgctggcaaaggggacgtcccaacgaagagaccacctgtccttcgagcaggagttaacaccgtcaccaccttggtggagaacaagaaagctcagctggtggtgattgcacacgacgtggatcccatcgagctggttgtcttcttgcctgccctgtgtcgtaaaatgggggtcccttactgcattatcaagggaaaggcaagactgggacgtctagtccacaggaagacctgcaccactgtcgccttcacacaggtgaactcggaagacaaaggcgctttggctaagctggtggaagctatcaggaccaattacaatgacagatacgatgagatccgccgtcactggggtggcaatgtcctgggtcctaagtctgtggctcgtatcgccaagctcgaaaaggcaaaggctaaagaacttgccactaaactgggttaa

SEQ ID NO: 275 - DNA, 492 bp, Homo Sapiens
atggcggacgaggagaagctgccgcccggctgggagaagcgcatgagccgcagctcaggccgagtgtactacttcaaccacatcactaacgccagccagtgggagcggcccagcggcaacagcagcagtggtggcaaaaacgggcagggggagcctgccagggtccgctgctcgcacctgctggtgaagcacagccagtcacggcggccctcgtcctggcggcaggagaagatcacccggaccaaggaggaggccctggagctgatcaacggctacatccagaagatcaagtcgggagaggaggactttgagtctctggcctcacagttcagcgactgcagctcagccaaggccaggggagacctgggtgccttcagcagaggtcagatgcagaagccatttgaagacgcctcgtttgcgctgcggacgggggagatgagcgggcccgtgttcacggattccggcatccacatcatcctccgcactgagtga

SEQ ID NO: 276 - DNA, 2421 bp, Homo Sapiens
atggcttctggagccgattcaaaaggtgatgacctatcaacagccattctcaaacagaagaaccgtcccaatcggttaattgttgatgaagccatcaatgaggacaacagtgtggtgtccttgtcccagcccaagatggatgaattgcagttgttccgaggtgacacagtgttgctgaaaggaaagaagagacgagaagctgtttgcatcgtcctttctgatgatacttgttctgatgagaagattcggatgaatagagttgttcggaataaccttcgtgtacgcctaggggatgtcatcagcatccagccatgccctgatgtgaagtacggcaaacgtatccatgtgctgcccattgatgacacagtggaaggcattactggtaatctcttcgaggtataccttaagccgtacttcctggaagcgtatcgacccatccggaaaggagacatttttcttgtccgtggtgggatgcgtgctgtggagttcaaagtggtggaaacagatcctagcccttattgcattgttgctccagacacagtgatccactgcgaaggggagcctatcaaacgagaggatgaggaagagtccttgaatgaagtagggtatgatgacattggtggctgcaggaagcagctagctcagatcaaagagatggtggaactgcccctgagacatcctgccctctttaaggcaattggtgtgaagcctcctagaggaatcctgctttacggacctcctggaacaggaaagaccctgattgctcgagctgtagcaaatgagactggagccttcttcttcttgatcaatggtcctgagatcatgagcaaattggctggtgagtctgagagcaaccttcgtaaagcctttgaggaggctgagaagaatgctcctgccatcatcttcattgatgagctagatgccatcgctcccaaaagagagaaaactcatggcgaggtggagcggcgcattgtatcacagttgttgaccctcatggatggcctaaagcagagggcacatgtgattgttatggcagcaaccaacagacccaacagcattgacccagctctacggcgatttggtcgctttgacagggaggtagatattggaattcctgatgctacaggacgcttagagattcttcagatccataccaagaacatgaagctggcagatgatgtggacctggaacaggtagccaatgagactcacgggcatgtgggtgctgacttagcagccctgtgctcagaggctgctctgcaagccatccgcaagaagatggatctcattgacctagaggatgagaccattgatgccgaggtcatgaactctctagcagttactatggatgacttccggtgggccttgagccagagtaacccatcagcactgcgggaaaccgtggtagaggtgccacaggtaacctgggaagacatcgggggcctagaggatgtcaaacgtgagctacaggagctggtccagtatcctgtggagcacccagacaaattcctgaagtttggcatgacaccttccaagggagttctgttctatggacctcctggctgtgggaaaactttgttggccaaagccattgctaatgaatgccaggccaacttcatctccatcaagggtcctgagctgctcaccatgtggtttggggagtctgaggccaatgtcagagaaatctttgacaaggcccgccaagctgccccctgtgtgctattctttgatgagctggattcgattgccaaggctcgtggaggtaacattggagatggtggtggggctgctgaccgagtcatcaaccagatcctgacagaaatggatggcatgtccacaaaaaaaaatgtgttcatcattggcgctaccaaccggcctgacatcattgatcctgccatcctcagacctggccgtcttgatcagctcatctacatcccacttcctgatgagaagtcccgtgttgccatcctcaaggctaacctgcgcaagtccccagttgccaaggatgtggacttggagttcctggctaaaatgactaatggcttctctggagctgacctgacagagatttgccagcgtgcttgcaagctggccatccgtgaatccatcgagagtgagattaggcgagaacgagagaggcagacaaacccatcagccatggaggtagaagaggatgatccagtgcctgagatccgtcgagatcactttgaagaagccatgcgctttgcgcgccgttctgtcagtgacaatgacattcggaagtatgagatgtttgcccagacccttcagcagagtcggggctttggcagcttcagattcccttcagggaaccagggtggagctggccccagtcagggcagtggaggcggcacaggtggcagtgtatacacagaagacaatgatgatgacctgtatggctaa

SEQ ID NO: 277 - DNA, 1146 bp, Homo Sapiens
atgcccttctccaacagccacaacgcactgaagctgcgcttcccggccgaggacgagttccccgacctgagcgcccacaacaaccacatggccaaggtgctgacccccgagctgtacgcggagctgcgcgccaagagcacgccgagcggcttcacgctggacgacgtcatccagacaggcgtggacaacccgggccacccgtacatcatgaccgtgggctgcgtggcgggcgacgaggagtcctacgaagtgttcaaggatctcttcgaccccatcatcgaggaccggcacggcggctacaagcccagcgatgagcacaagaccgacctcaaccccgacaacctgcagggcggcgacgacctggaccccaactacgtgctgagctcgcgggtgcgcacgggccgcagcatccgtggcttctgcctccccccgcactgcagccgcggggagcgccgcgccatcgagaagctcgcggtggaagccctgtccagcctggacggcgacctggcgggccgatactacgcgctcaagagcatgacggaggcggagcagcagcagctcatcgacgaccacttcctcttcgacaagcccgtgtcgcccctgctgctggcctcgggcatggcccgcgactggcccgacgcccgcggtatctggcacaatgacaataagaccttcctggtgtgggtcaacgaggaggaccacctgcgggtcatctccatgcagaaggggggcaacatgaaggaggtgttcacccgcttctgcaccggcctcacccagattgaaactctcttcaagtctaaggactatgagttcatgtggaaccctcacctgggctacatcctcacctgcccatccaacctgggcaccgggctgcgggcaggtgtgcatatcaagctgcccaacctgggcaagcatgagaagttctcggaggtgcttaagcggctgcgacttcagaagcgaggcacaggcggtgtggacacggctgcggtgggcggggtcttcgacgtctccaacgctgaccgcctgggcttctcagaggtggagctggtgcagatggtggtggacggagtgaagctgctcatcgagatggagcagcggctggagcagggccaggccatcgacgacctcatgcctgcccagaaatga

SEQ ID NO: 278 - DNA, 1401 bp, Homo Sapiens
atgtccaccaggtccgtgtcctcgtcctcctaccgcaggatgttcggcggcccgggcaccgcgagccggccgagctccagccggagctacgtgactacgtccacccgcacctacagcctgggcagcgcgctgcgccccagcaccagccgcagcctctacgcctcgtccccgggcggcgtgtatgccacgcgctcctctgccgtgcgcctgcggagcagcgtgcccggggtgcggctcctgcaggactcggtggacttctcgctggccgacgccatcaacaccgagttcaagaacacccgcaccaacgagaaggtggagctgcaggagctgaatgaccgcttcgccaactacatcgacaaggtgcgcttcctggagcagcagaataagatcctgctggccgagctcgagcagctcaagggccaaggcaagtcgcgcctgggggacctctacgaggaggagatgcgggagctgcgccggcaggtggaccagctaaccaacgacaaagcccgcgtcgaggtggagcgcgacaacctggccgaggacatcatgcgcctccgggagaaattgcaggaggagatgcttcagagagaggaagccgaaaacaccctgcaatctttcagacaggatgttgacaatgcgtctctggcacgtcttgaccttgaacgcaaagtggaatctttgcaagaagagattgcctttttgaagaaactccacgaagaggaaatccaggagctgcaggctcagattcaggaacagcatgtccaaatcgatgtggatgtttccaagcctgacctcacggctgccctgcgtgacgtacgtcagcaatatgaaagtgtggctgccaagaacctgcaggaggcagaagaatggtacaaatccaagtttgctgacctctctgaggctgccaaccggaacaatgacgccctgcgccaggcaaagcaggagtccactgagtaccggagacaggtgcagtccctcacctgtgaagtggatgcccttaaaggaaccaatgagtccctggaacgccagatgcgtgaaatggaagagaactttgccgttgaagctgctaactaccaagacactattggccgcctgcaggatgagattcagaatatgaaggaggaaatggctcgtcaccttcgtgaataccaagacctgctcaatgttaagatggcccttgacattgagattgccacctacaggaagctgctggaaggcgaggagagcaggatttctctgcctcttccaaacttttcctccctgaacctgagggaaactaatctggattcactccctctggttgatacccactcaaaaaggacacttctgattaagacggttgaaactagagatggacaggttatcaacgaaacttctcagcatcacgatgaccttgaataa

SEQ ID NO: 279 - DNA, 894 bp, Homo Sapiens
atggggtttgttaaagttgttaagaataaggcctactttaagagataccaagtgaaatttagaagacgacgagagggtaaaactgattattatgctcggaaacgcttggtgatacaagataaaaataaatacaacacacccaaatacaggatgatagttcgtgtgacaaacagagatatcatttgtcagattgcttatgcccgtatagagggggatatgatagtctgcgcagcgtatgcacacgaactgccaaaatatggtgtgaaggttggcctgacaaattatgctgcagcatattgtactggcctgctgctggcccgcaggcttctcaataggtttggcatggacaagatctatgaaggccaagtggaggtgactggtgatgaatacaatgtggaaagcattgatggtcagccaggtgccttcacctgctatttggatgcaggccttgccagaactaccactggcaataaagtttttggtgccctgaagggagctgtggatggaggcttgtctatccctcacagtaccaaacgattccctggttatgattctgaaagcaaggaatttaatgcagaagtacatcggaagcacatcatgggccagaatgttgcagattacatgcgctacttaatggaagaagatgaagatgcttacaagaaacagttctctcaatacataaagaacagcgtaactccagacatgatggaggagatgtataagaaagctcatgctgctatacgagagaatccagtctatgaaaagaagcccaagaaagaagttaaaaagaagaggtggaaccgtcccaaaatgtcccttgctcagaagaaggatcgggtagctcaaaagaaggcaagcttcctcagagctcaggagcgggctgctgagagctaa

SEQ ID NO: 280 - DNA, 1086 bp, Homo Sapiens
atgttctcgtccgtggcgcacctggcgcgggcgaaccccttcaacacgccacatctgcagctggtgcacgatggtctcggggacctccgcagcagctccccagggcccacgggccagccccgccgccctcgcaacctggcagccgccgccgtggaagagtacagttgtgaatttggctccgcgaagtattatgcactgtgtggctttggtggggtcttaagttgtggtctgacacacactgctgtggttcccctggatttagtgaaatgccgtatgcaggtggacccccaaaagtacaagggcatatttaacggattctcagttacacttaaagaggatggtgttcgtggtttggctaaaggatgggctccgactttccttggctactccatgcagggactctgcaagtttggcttttatgaagtctttaaagtcttgtatagcaatatgcttggagaggagaatacttatctctggcgcacatcactatatttggctgcctctgccagtgctgaattctttgctgacattgccctggctcctatggaagctgctaaggttcgaattcaaacccagccaggttatgccaacactttgagggatgcagctcccaaaatgtataaggaagaaggcctaaaagcattctacaagggggttgctcctctctggatgagacagataccatacaccatgatgaagttcgcctgctttgaacgtactgttgaagcactgtacaagtttgtggttcctaagccccgcagtgaatgttcaaagccagagcagctggttgtaacatttgtagcaggttacatagctggagtcttttgtgcaattgtttctcaccctgctgattctgtggtatctgtgttgaataaagaaaaaggtagcagtgcttctctggtcctcaagagacttggatttaaaggtgtatggaagggactgtttgcccgtatcatcatgattggtaccctgactgcactacagtggtttatctatgactccgtgaaggtctacttcagacttcctcgccctcctccacccgagatgccagagtctctgaagaagaagcttgggttaactcagtag

SEQ ID NO: 281 - DNA, 1881 bp, Homo Sapiens
atgatccccgccaacgcctccgccaggaaggggcccgagggcaagtatccgctgcactacctcgtgtggcacaaccgccaccgcgagctggagaaggaggtccgcgcgggccaggtggacatcgagcagctggatccccgcggccggactcccctgcacctggccaccacgctggggcaccttgagtgtgcccgtgtgctcctggcgcacggcgcagacgtgggcagggagaatcgcagcggctggacagtgctccaggaggctgtgagtacccgggacctggagctggtgcagctggtgcttcggtaccgggactaccagcgggtggtgaagcggctggcgggcatccccgtgctcctggagaagctgcgcaagccccaggacttctacgtggagatgaaatgggagttcactagctgggtgcccctggtgtccaagatctgccctagtgacacctacaaagtgtggaagagcggccagaacctgagggtagacaccacactcctgggctttgaccacatgacctggcagcgagggaaccgcagctttgtcttcaggggccaagacacaagcgccgtggtcatggagattgaccacgaccgccgggtggtgtacacagagactctggcactggctgggcaggaccgggagctgctgctggctgctgctcagcccactgaggaacaggtgctgagccggcttaccgcgcccgtcgtcaccactcagcttgacaccaagaatatctcctttgagaggaacaagactggcatcctgggctggcgcagtgaaaagacggagatggtgaatgggtatgaagctaaggtgtatggggcatctaacgtggagctcatcacccgcacacggacagaacatctttcagaacatcacaagggcaaggtcaaaggctgtaagacacctttgcagtccttcctgggaatcgctgagcagcacgggggcccccaaaatgggaccctgatcactcagactctgagccaagccaaccccactgccatcactgcagaagaatacttcaaccccaactttgagctgggcaaccgtgatatgggccgccccatggaactgaccaccaagacacagaagttcaaggccaagctgtggctgtgtgaggagcatcccctgtccctgtgtgagcaggtggcccccatcattgacctcatggccgtcagcaatgcgctttttgccaagctccgggacttcatcaccctgcgtctgcctcctggcttcccagttaagattgaaatcccgatcttccacatcctcaacgcccgcatcaccttcgggaacctcaacggctgcgacgaaccggtgccatcggtgcgaggcagccccagcagcgagacgccttccccaggcagcgactcctccagcgtcagcagctccagctccacgacctcctgccgcggctgcgagatctccccagcgttgttcgaggccccgcgcggctacagcatgatgggcggccagcgggaggcggcgacccgggacgacgacgacgacctgctgcaattcgccatccagcagagcctgcttgaggcgggcagtgagtatgaccaggtcaccatctgggaggcgctaaccaacagcaagccaggcacccaccccatgtcctacgagggtcgccgacaggacaggagcgccccgcccacgccgcagcgccagcctgcgcccccggcgtcagtgcccagccctcggcccagctcagggccaggttccggcggccacgtgttccggagctacgacgagcagctgcggctggcgatggaactgtcggcgcaggagcaggaggagaggcggcggcgcgcgcgccaggaggaggaggagctggagcgcatcctgaggctctcactgaccgagcagtag

SEQ ID NO: 282 - DNA, 669 bp, Homo Sapiens
atggacctattgttcgggcgccggaagacgccagaggagctactgcggcagaaccagagggccctgaaccgtgccatgcgggagctggaccgcgagcgacagaaactagagacccaggagaagaaaatcattgcagacattaagaagatggccaagcaaggccagatggatgctgttcgcatcatggcaaaagacttggtgcgcacccggcgctatgtgcgcaagtttgtattgatgcgggccaacatccaggctgtgtccctcaagatccagacactcaagtccaacaactcgatggcacaagccatgaagggtgtcaccaaggccatgggcaccatgaacagacagctgaagttgccccagatccagaagatcatgatggagtttgagcggcaggcagagatcatggatatgaaggaggagatgatgaatgatgccattgatgatgccatgggtgatgaggaagatgaagaggagagtgatgctgtggtgtcccaggttctggatgagctgggacttagcctaacagatgagctgtcgaacctcccctcaactgggggctcgcttagtgtggctgctggtgggaaaaaagcagaggccgcagcctcagccctagctgatgctgatgcagacctggaggaacggcttaagaacctgcggagggactga

SEQ ID NO: 283 - DNA, 822 bp, Homo Sapiens
atgggccggtctcggagccggagctcgtcccgctccaagcacaccaagagcagcaagcacaacaagaagcgcagccggtcccggtcgcgatcccgggacaaggagcgcgtgcggaagcgttccaaatctcgggaaagtaaacggaaccggcggcgggagtcgcggtcccgttcgcgctccaccaacacggccgtgtcccggcgcgagcgggaccgggagcgcgcctcgtccccgcccgaccgcatcgacatcttcgggcgcacggtgagcaagcgcagcagcctggacgagaagcagaagcgagaggaggaggagaagaaagcggagttcgagcggcagcgaaaaattcgacagcaagaaatagaagaaaaactcatcgaggaagaaacagcacgaagagtagaagaattggtagcaaaaagggtggaggaagaactggagaaaaggaaggatgaaattgaacgagaagttctccgaagggtggaggaagccaaacgcatcatggaaaagcagttgctcgaagaactcgagcgacagagacaagctgagcttgccgcacaaaaagctagagaggaggaagaacgtgcaaaacgtgaggagctagagcgaatactggaagagaataaccgaaaaattgcagaagcacaagccaaactggccgaagaacagttgagaattgttgaagaacaaagaaagattcatgaggaaaggatgaaactagaacaagaacgacaacgtcaacaaaaagaagaacaaaaaattatcctgggcaaggggaagtccaggccaaaactgtccttctcattaaaaacccaggattaa

SEQ ID NO: 284 - DNA, 552 bp, Homo Sapiens
atgatcaagctgttctcgctgaagcagcagaagaaggaggaggagtcggcgggcggcaccaagggcagcagcaagaaggcgtcggcggcgcagctgcggatccagaaggacataaacgagctgaacctgcccaagacgtgtgatatcagcttctcagatccagacgacctcctcaacttcaagctggtcatctgtcctgatgagggcttctacaagagtgggaagtttgtgttcagttttaaggtgggccagggttacccgcatgatccccccaaggtgaagtgtgagacaatggtctatcaccccaacattgacctcgagggcaacgtctgcctcaacatcctcagagaggactggaagccagtccttacgataaactccataatttatggcctgcagtatctcttcttggagcccaaccccgaggacccactgaacaaggaggccgcagaggtcctgcagaacaaccggcggctgtttgagcagaacgtgcagcgctccatgcggggtggctacatcggctccacctactttgagcgctgcctgaaatag

SEQ ID NO: 285 - DNA, 1794 bp, Homo Sapiens
atggagcgaccggcgcccctggccgtgcttcccttctcggaccccgcgcacgccctgagcctgctgcgcggcctgagccagctgcgcgccgagcgcaagttcctggacgtgaccctggaggcggcgggcgggcgcgacttcccggcgcaccgtgcggtgctggccgccgccagcccctacttccgcgccatgttcgcggggcagctgcgcgagagccgcgccgagcgggtgcgcctgcacggagtgcctcccgacatgctgcagctgctgctggacttcagctacacgggccgcgtggcggtaagcggcgacaacgctgagccgctgctgcgcgccgccgacctgctgcagttcccggccgtgaaggaggcgtgcggggccttcctgcagcagcagctcgacctggccaactgcctggacatgcaggacttcgctgaggccttcagctgctcgggactggcgagcgcggcgcagcggttcattctgcgccacgtgggcgagctgggcgccgagcagctggagcggctgccactggcgcgcctgctgcgctacctgcgggacgacgggctgtgtgtgcccaaggaggaggccgcctaccagctggcgctgcgctgggtccgcgctgacccgccgcgccgcgccgcgcactggccgcagctgctggaggccgtgcgcctgcccttcgtgcgccgcttctacctgttggcgcacgtcgaggccgagccgctggtggcgcgctgcccaccctgcctgcgcctgctgcgcgaggcgcgcgacttccaggcggcgcgctacgaccgccacgaccgcgggccctgtccccgaatgcgtcctcgcccgtccaccggtctcgccgagatcctcgtgctcgtgggcggctgcgaccaggactgtgacgagctggtcactgtcgactgctacaacccgcagacgggtcagtggcgctacctggccgagttcccagaccacctgggcggaggctacagcatcgtggcgctgggcaatgacatctacgtgacgggtgggtctgatggctcccggctctatgactgcgtgtggaggtacaactcaagcgtgaatgagtgggcggaggtggcgcccatgctgaaggcccgcgagtaccacagctcctctgtgctggacggactgctgtacgtggtggccgccgacagcaccgagcgctatgaccacaccactgactcctgggaggccctgcagcccatgacctaccccatggacaactgctccaccactgcgtgccgtggccggctctatgccatcggctccctggctggcaaggagaccatggtgatgcagtgctacgacccggacaccgacctgtggtcgctggtggactgcggccagctcccgccctggtccttcgcccccaagactgcgactctaaacggactcatgtactttgtcagggatgactccgctgaggtggacgtgtacaacccgacgaggaacgaatgggacaagatcccgtccatgaatcaggtacatgtggggggcagcctggccgtccttggggggaagctgtacgtctctgggggatacgacaatacatttgaactctcggacgtggtagaggcctatgacccagagactcgcgcgtggagcgtggtggggcggctcccagaacccaccttctggcatggcagtgtcagcatcttccgccagttcatgccccagaccttctcgggtgggcgtggcttcgagttggacagtggcagcgatgacatggacccaggccgaccccggccgccgcgggaccccgatgagctgcactag

SEQ ID NO: 286 - DNA, 1161 bp, Homo Sapiens
atgttcccggagcccccaaccccggggcctccatcgcccgacacgcctcccgactccagtcgcatcagccacggcccagtgcccccctgggccctggccaccatcgtgctggtctcaggcctcctcatcttcagctgctgtttctgtctctaccggaagagctgtcggaggcggacaggcaagaagagccaggcccaagcccaggtccaccttcaggaagtgaaggggctgggccagagttacatagacaaggtgcagccagaagtagaggagctggagccagcaccatccgggccagggcagcaggtggcagacaagcatgagctaggacgactgcagtactccctggattatgacttccagagtggccagctgctggtgggcattctgcaagcaatgggattggcagccttggatcttggtggctcctcggacccctatgtgcgggtctacctgctgccggacaaacggaggcggtacgagaccaaggtgcatcggcagacgctgaaccctcactttggggagaccttcgccttcaaggtcccctacgtggagctggggggcagggtgctggtcatggcggtgtacgacttcgaccgcttctctcgcaatgacgccatcggggaggtgcgggtccctatgagctccgtggacctggggcggccagtgcaggcctggcgggagctgcaggcggctccgcgggaggagcaggagaagcttggggacatctgcttctccctccgctatgtccccacggccgggaagctcaccgtcatcgtcctggaggctaaaaacctgaagaagatggacgtaggaggactgtcagatccatacgtcaaggtccacctgctgcagggcggcaaaaaggtgcggaagaagaaaaccaccatcaagaagaacactctgaacccctattacaacgaagctttcagcttcgaggtgccctgtgaccaagtccagaaggtgcaggtggagctgaccgtgctggactacgacaagctgggcaagaacgaggccatcgggagggtggccgtgggggcggccgccggcggggctggcctgcggcactgggcggacatgctggccaacccgcggcggcccattgcccagtggcactcgctgcggcccccggaccgagtgaggctgctgcctgcgccctga

SEQ ID NO: 287 - DNA, 1506 bp, Homo Sapiens
atgccgtttgggtgtgtgactctgggcgacaagaagaactataaccagccatcggaggtgactgacagatatgatttgggacaggtcatcaagactgaggagttttgtgaaatcttccgggccaaggacaagacgacaggcaagctgcacacctgcaagaagttccagaagcgggacggccgcaaggtgcggaaagctgccaagaacgagataggcatcctcaagatggtgaagcatcccaacatcctacagctggtggatgtgtttgtgacccgcaaggagtactttatcttcctggagctggccacggggagggaggtgtttgactggatcctggaccagggctactactcggagcgagacacaagcaacgtggtacggcaagtcctggaggccgtggcctatttgcactcactcaagatcgtgcacaggaatctcaagctggagaacctggtttactacaaccggctgaagaactcgaagattgtcatcagtgacttccatctggctaagctagaaaatggcctcatcaaggagccctgtgggacccccgagtatctggccccagaggtggtaggccggcagcggtatggacgccctgtggactgctgggccattggagtcatcatgtacatcctgctttcaggcaatccacctttctatgaggaggtggaagaagatgattatgagaaccatgataagaatctcttccgcaagatcctggctggtgactatgagtttgactctccatattgggatgatatttcgcaggcagccaaagacctggtcacaaggctgatggaggtggagcaagaccagcggatcactgcagaagaggccatctcccatgagtggatttctggcaatgctgcttctgataagaacatcaaggatggtgtctgtgcccagattgaaaagaactttgccagggccaagtggaagaaggctgtccgagtgaccaccctcatgaaacggctccgggcaccagagcagtccagcacggctgcagcccagtcggcctcagccacagacactgccacccccggggctgcaggtggggccacagctgcagctgcgagtggagctacctcagcccctgagggtgatgctgctcgtgctgcaaagagtgataatgtggcccccgcagaccgtagtgccaccccagccacagatggaagtgccaccccagccactgatggcagtgtcaccccagccaccgatggaagcatcactccagccactgatgggagtgtcaccccagccactgacaggagcgctactccagccactgatgggagagccacaccagccacagaagagagcactgtgcccaccacccaaagcagtgccatgctggccaccaaggcagctgccacccctgagccggctatggcccagccggacagcacagccccagagggcgccacaggccaggctccaccctctagtaaaggggaagaggctgctggttatgcccaggagtctcaaagggaggaggccagctga

SEQ ID NO: 288 - DNA, 1659 bp, Homo Sapiens
atgttggaccacaaggacttagaggccgaaatccaccccttgaaaaatgaagaaagaaaatcgcaggaaaatctgggaaatccatcaaaaaatgaggataacgtgaaaagcgcgcctccacagtcccggctctcccggtgccgagcggcggcgttttttctttcattgtttctctgcctttttgtggtgttcgtcgtctcattcgtcatcccgtgtccagaccggccggcgtcacagcgaatgtggaggatagactacagtgccgctgttatctatgactttctggctgtggatgatataaacggggacaggatccaagatgttctttttctttataaaaacaccaacagcagcaacaatttcagccgatcctgtgtggacgaaggcttttcctctccctgcacctttgcagctgctgtgtcgggggccaacggcagcacgctctgggagagacctgtggcccaagacgtggccctcgtggagtgtgctgtgccccagccaagaggcagtgaggcaccttctgcctgcatcctggtgggcagacccagttctttcattgcagtcaacttgttcacaggggaaaccctgtggaaccacagcagcagcttcagcgggaatgcgtccatcctgagccctctgctgcaggtgcctgatgtggacggcgatggggccccagacctgctggttctcacccaggagcgggaggaggttagtggccacctctactccggcagcaccgggcaccagattggcctcagaggcagccttggtgtggacggggaaagtggcttcctccttcacgtcaccaggacaggtgcccactacatcctctttccctgcgcaagctccctctgcggctgctctgtgaagggtctctacgagaaggtgaccgggagcggcggcccgttcaagagtgacccgcactgggagagcatgctcaatgccaccacccgcaggatgctttcccacagctctggagcagtgcgctacctgatgcatgtcccagggaacgccggtgcagatgtgcttcttgtgggctcagaggccttcgtgctgctggacgggcaggagctgacgcctcgctggacacccaaggcagcccatgtcctgagaaaacccatcttcggccgctacaaaccagacaccttggctgtagccgttgaaaacggaactggcaccgacagacagatcctgtttctggaccttggcactggagccgtcctgtgtagcctagccctcccgagcctccctgggggtccactgtccgccagcctgccgaccgcagaccaccgctcagccttcttcttctggggcctccacgagctggggagcaccagcgagacggagaccggggaggcccggcacagcctgtacatgttccaccccaccctgccgcgcgtgctgctggagctggccaatgtctctacccacattgtcgcctttgacgccgtcctgtttgagccaagccgccacgccgcctacatccttctgacaggcccggcagactcagaggcacccggcctggtctctgtgatcaagcacaaggtgcgggaccttgtcccaagcagcagggtggtccgcctgggtgagggtgggccagacagtgaccaagccatcagggaccggttctcccggctgcggtaccagagtgaggcgtag

SEQ ID NO: 289 - DNA, 495 bp, Homo Sapiens
atgtctgtggatcccctatccagcaaagctctaaagatcaagcgagagctgagcgagaacacgccgcacctgtcggacgaggcgctgatggggctgtcggtgcgcgagctgaaccggcatctgcgcgggctctccgccgaggaggtgacacggctcaagcagcggcgccgcacactcaaaaaccgtggctacgccgccagctgccgcgtgaagcgcgtgtgccagaaggaggagctgcagaagcagaagtcggagctggagcgcgaggtggacaagctggcgcgcgagaacgccgccatgcgcctggagctcgacgcgctgcgcggcaagtgcgaggcgctgcagggcttcgcgcgctccgtggccgccgcccgcgggcccgccacgctcgtggcgccggccagcgtcatcaccatcgtcaagtccaccccgggctcggggtctggccccgcccacggcccggaccccgcccacggcccggcctcctgctcctag

SEQ ID NO: 290 - DNA, 1008 bp, Homo Sapiens
atggcggtggacatcacgctgctattccgggccagcgtcaagaccgtgaagacgcggaacaaggcgctgggagtggcggtgggcggcggggtcgatggcagccgggacgagctgttccgccggagcccccggcccaagggcgacttctccagccgggcccgcgaagtgatttctcacattggcaaactgagagattttcttctggaacacaggaaagattatattaatgcttatagccataccatgtctgaatatgggaggatgacagacacagaacgagaccagatagaccaggatgcccagatattcatgaggacctgttcagaagcaattcagcaactacgaacagaagctcacaaggagatacattcccagcaagtgaaggagcacaggaccgctgttttggatttcattgaagattacttgaaaagagtatgtaaactttactcagaacagagagccatccgagttaaaagagtggtggataagaaaagattatctaagctggaaccagaaccaaatacaaagacaagagaatccacatcttctgagaaagtttcacagagtccttcaaaagactctgaagaaaaccctgccactgaagaacgtccagaaaaaattttggctgaaacacaacctgaattgggaacgtggggagatggcaaaggcgaagatgagttatccccagaagaaatacaaatgtttgaacaggaaaatcagcgactaattggtgaaatgaacagcttgtttgatgaagtgaggcaaatcgaagggagagtggttgagatttccagactccaagagatattcacggaaaaggttttgcaacaggaagctgagattgacagcattcaccagttagttgtgggggcaactgaaaatatcaaggaaggcaacgaagacataagagaggccattaaaaacaacgctggcttccgcgtgtggatcctcttcttcctcgtgatgtgctccttctccttgctcttcctcgactggtacgacagctag

SEQ ID NO: 291 - DNA, 1914 bp, Homo Sapiens
atggatccgggcagtggcggcggcggcggcggcggcggcggcggcgggagcagcagcggcagcagcagcagcgactcggcgcctgactgctgggaccaggcggacatggaagcccccgggccgggcccttgcggcggcggcggctccctggcggcggcggccgaggcccagcgggagaacctcagcgcggccttcagccggcaactcaacgtcaacgccaagcccttcgtgcccaacgtccacgccgccgagttcgtgccgtccttcctgcggggcccggcagcgccgccacccccagctggcggcgccgccaataaccacggagccggcagcggcgcgggaggccgtgcggcacctgtggaatcctctcaagaggaacagtcattgtgtgaaggttcaaattcagctgttagcatggaactttcagaacctattgtagaaaatggagagacagaaatgtctccagaagaatcatgggagcacaaagaagaaataagtgaagcagagccagggggtggttccttgggagatggaaggccgccagaggaaagtgcccatgaaatgatggaggaggaagaggaaatcccaaaacctaagtctgtggttgcaccgccaggtgctcctaagaaagagcatgtaaatgtagtattcattgggcacgtagatgctggcaagtcaaccattggaggacaaataatgtatttgactggaatggttgacaaaaggacgcttgaaaagtatgaaagagaagctaaagagaaaaacagagaaacttggtacttgtcttgggccttagacacaaatcaggaagaacgagacaagggtaaaacagtagaagtgggtcgtgcctattttgaaaccgaaaagaagcatttcacaattctagatgcccctggccacaagagttttgtcccaaatatgattggtggtgcctctcaagctgatttggctgtgctggtaatctcagccaggaaaggagagtttgaaactggatttgaaaaaggaggacagacaagagaacatgcaatgttggcaaagacagcaggtgtaaaacacctaattgtgctaattaataagatggatgatccaacagtaaattggagcaatgagagatatgaagaatgtaaggagaaactagtgccatttttgaaaaaagttggcttcaatcccaaaaaggacattcactttatgccctgctcaggacttactggagcaaatctcaaagagcagtcggatttctgtccttggtacattggattaccgtttattccatatctggataatttgccgaacttcaatagatcagttgatggaccaatcaggctgccaattgtggataagtacaaggatatgggcactgtggtcctgggaaagctggaatcaggatctatttgtaaaggccagcagcttgtgatgatgccaaacaagcacaacgtggaagttcttggaatactttccgatgatgtagagactgataccgtagccccaggtgaaaacctcaaaatcagactgaaaggaattgaagaagaggagattcttccagggtttatactttgtgatcctaataatctttgtcattctggacgcacatttgatgcccagatagtgattatagagcacaaatccatcatctgcccaggctataatgcggtgctgcatattcatacctgtattgaggaggtggaaataacagccttaatctgcttggtagacaaaaaatcaggagaaaaaagtaagacccgaccccgttttgtcaaacaagatcaagtatgcattgctcgcttaaggacagcaggaaccatctgccttgagacctttaaagacttccctcagatgggtcgtttcaccttaagagatgagggtaagaccattgcaattggaaaagttctgaaactggttccagagaaagactaa

SEQ ID NO: 292 - DNA, 1341 bp, Homo Sapiens
atggaagcgagctttgtccagaccaccatggctctggggctgtcctccaagaaagcgtcctctcgcaacgtggctgtggagcgtaagaacctgatcaccgtgtgcaggttctctgtgaaaacgctgctggagaagtacacagcggagcccatcgatgactcatcggaggagtttgtcaattttgcagccattttagagcagatcctcagccaccgcttcaaagcctgtgccccagcaggtccagtgagctggttcagctcagacgggcagcggggcttttgggactatatccggctggcctgcagcaaagtgcccaacaactgtgtgagcagcatcgagaacatggagaacatcagcacagcccgggccaagggccgggcatggatccgggtggcactgatggagaagcgcatgtcagaatacatcaccacggctctgcgtgacacccggaccaccagacggttctatgactctggagccatcatgctgcgggatgaagccaccatcctcaccggaatgctgatcggactgagcgccatcgacttcagcttctgtctaaagggggaagtcctggacgggaagacccccgtggtcatcgattacacgccctacctaaagttcacgcagagctacgactacctgacggacgaggaggagcggcacagcgccgagagcagcacgagcgaggacaactcgcccgagcacccgtacctcccgctcgtcaccgatgaggacagctggtacagcaagtggcacaagatggagcagaagttccgcatcgtctacgcgcagaagggctacctggaggagctggtgcgtctgcgcgagtcgcagctgaaggacctggaggcggagaaccggcggcttcagctgcagctggaggaggcggcggcgcagaaccagcgcgagaaacgggagctggaaggcgtgatcctggagctgcaggagcagctgacaggtctgatccccagtgaccacgcccctctggcccagggttccaaggagctcactacacccctggtcaatcaatggccctcactgggaacgcttaatggggccgagggcgccagcaactccaagctctaccggagacacagcttcatgagcacggagccgctgtcagctgaagccagtctgagctcggactcccagcgcctgggagagggcacgcgggacgaggagccctggggtcccatcgggaaggaccccacgccctccatgctgggcctctgcggctccctggcctccattcccagctgcaagtccctggcgagcttcaaatccaacgagtgcctggtgagcgacagtcccgagggcagcccagcactgagccccagctga

SEQ ID NO: 293 - DNA, 7603 bp, Homo Sapiens
ttttcttgcttttcttcccttttttttctttttgcaaacaaaacaaaaaacagcatagaagaaagagcaaaataaagaagaagaagaggaggaagagagggaaagagaggaagggaaaaaaaacaccaacccgggcagaggaggaggtgcggcggcggcggcggcggcggcagcggcggcagcggcgcggcggcggctcggaccccctcccccggctccccccatcagtgcagctctccgggcgatgccagaatagatgccggggcaatgtcccgccgcaaacagggcaacccgcagcacttgtcccagagggagctcatcaccccagaggctgaccatgtggaggccgccatcctcgaagaagacgagggtctggagatagaggagccaagtggcctggggctgatggtgggtggccccgaccctgacctgctcacctgtggccagtgtcaaatgaacttccccttgggggacatcctggtttttatagagcacaaaaggaagcagtgtggcggcagcttgggtgcctgctatgacaaggccctggacaaggacagcccgccaccctcctcacgctccgagctcaggaaagtgtccgagccggtggagatcgggatccaagtcacccccgacgaagatgaccacctgctctcacccacgaaaggcatctgtcccaagcaggagaacattgcaggtaaagatgagccttccagctacatttgcacaacatgcaagcagcccttcaacagcgcgtggttcctgctgcagcacgcgcagaacacgcacggcttccgcatctacctggagcccgggccggccagcagctcgctcacgccgcggctcaccatcccgccgccgctcgggccggaggccgtggcgcagtccccgctcatgaatttcctgggcgacagcaaccccttcaacctgctgcgcatgacgggccccatcctgcgggaccacccgggcttcggcgagggccgcctgccgggcacgccgcctctcttcagtcccccgccgcgccaccacctggacccgcaccgcctcagtgccgaggagatggggctcgtcgcccagcaccccagtgccttcgaccgagtcatgcgcctgaaccccatggccatcgactcgcccgccatggacttctcgcggcggctccgcgagctggcgggcaacagctccacgccgccgcccgtgtccccgggccgcggcaaccctatgcaccggctcctgaaccccttccagcccagccccaagtccccgttcctgagcacgccgccgctgccgcccatgccccctggcggcacgccgcccccgcagccgccagccaagagcaagtcgtgcgagttctgcggcaagaccttcaagttccagagcaatctcatcgtgcaccggcgcagtcacacgggcgagaagccctacaagtgccagctgtgcgaccacgcgtgctcgcaggccagcaagctcaagcgccacatgaagacgcacatgcacaaggccggctcgctggccggccgctccgacgacgggctctcggccgccagctcccccgagcccggcaccagcgagctggcgggcgagggcctcaaggcggccgacggtgacttccgccaccacgagagcgacccgtcgctgggccacgagccggaggaggaggacgaggaggaggaggaggaggaggaggagctgctactggagaacgagagccggcccgagtcgagcttcagcatggactcggagctgagccgcaaccgcgagaacggcggtggtggggtgcccggggtcccgggcgcggggggcggcgcggccaaggcgctggctgacgagaaggcgctggtgctgggcaaggtcatggagaacgtgggcctaggcgcactgccgcagtacggcgagctcctggccgacaagcagaagcgcggcgccttcctgaagcgtgcggcgggcggcggggacgcgggcgacgacgacgacgcgggcggctgcggggacgcgggcgcgggcggcgcggtcaacgggcgcgggggcggcttcgcgccaggcaccgagcccttccccgggctcttcccgcgcaagcccgcgccgctgcccagccccgggctcaacagcgccgccaagcgcatcaaggtggagaaggacctggagctgccgcccgccgcgctcatcccgtccgagaacgtgtactcgcagtggctggtgggctacgcggcgtcgcggcacttcatgaaggaccccttcctgggcttcacggacgcacgacagtcgcccttcgccacgtcgtccgagcactcgtccgagaacggcagcctgcgcttctccacgccgcccggggacctgctggacggcggcctctcgggccgcagcggcacggccagcggaggcagcaccccgcacctgggcggcccgggccccgggcggcccagctccaaggagggccgccgcagcgacacgtgcgagtactgcggcaaggtgttcaagaactgcagcaacttgacggtgcaccggcggagccacaccggcgagcggccttacaagtgcgagctgtgcaactacgcgtgcgcgcagagcagcaagctcacgcgccacatgaagacgcacgggcagatcggcaaggaggtgtaccgctgcgacatctgccagatgcccttcagcgtctacagcaccctggagaaacacatgaaaaagtggcacggcgagcacttgctgactaacgacgtcaaaatcgagcaggccgagaggagctaagcgcgcgggccccggcgccccgcacctgtacagtggaaccgttgccaaccgagagaatgctgacctgacttgcctccgtgtcaccgccaccccgcaccccgcgtgtccccggggcccaggggaggcggcactccaacctaacctgtgtctgcgaagtcctatggaaacccgagggttgattaaggcagtacaaattgtggagccttttaactgtgcaataatttctgtatttattgggttttgtaatttttttggcatgtgcaggtactttttattattattttttctgtttgaattcctttaagagattttgttgggtatccatcccttctttgttttttttttaacccggtagtagcctgagcaatgactcgcaagcaatgttagaggggaagcatatcttttaaattataatttggggggaggggtggtgctgcttttttgaaatttaagctaagcatgtgtaatttcttgtgaagaagccaacactcaaatgacttttaaagttgtttactttttcattccttccttttttttgtcctgaaataaaaagtggcatgcagttttttttttaattattttttaattttttttttggtttttgtttttggggtggggggtgtggatgtacagcggataacaatctttcaagtcgtagcactttgtttcagaactggaatggagatgtagcactcatgtcgtcccgagtcaagcggccttttctgtgttgatttcggctttcatattacataagggaaaccttgagtggtggtgctgggggaggcaccccacagactcagcgccgccagagatagggtttttggagggctcctctgggaaatggcccgacagcattctgaggttgtgcatgaccagcagatactatcctgttggtgtgccctggggtgccatggctgctattcgctgtagattaggctacataaaatgggctgagggtacctttttggggagatggggtggcctgcagtgacacagaaaggaagaaactagcggtgttcttttaggcgttttctggcttgacggcttctctctttttttaaatcacccccaccacataaatctcaaatcctatgttgctacaaggggtcatccatcatttcccaagcagacgaatgccctaattaattgaagttagtgttctctcatttaatgcacactgatgatattgtagggatgggtggggtggggatcttgcaaatttctattctcttttactgaaaaagcaggggatgagttccatcagaaggtgcccagcgctacttcccaggtttttattttttttttcctatctcattaggttggaaggtactaaatattgaactgttaagattagacatttgaattctgttgacccgcactttaaagcttttgtttgcatttaaattaaatggcttctaaacaagaaattgcagcatattcttctctttggcccagaggtgggttaaactgtaagggacagctgagattgagtgtcagtattgctaagcgtggcattcacaatactggcactataaagaacaaaataaaataataatttataggacagtttttctactgccattcaatttgatgtgagtgccttgaaaactgatcttcctatttgagtctcttgagacaaatgcaaaactttttttttgaaatgaaaagactttttaaaaaagtaaaacaagaaaagtacattctttagaaactaacaaagccacatttactttaagtaaaaaaaaaaaaaattctggttgaagatagaggatatgaaatgccataagacccaatcaaatgaagaaataaacccagcacaaccttggacatccattagctgaattatcctcagccccttttgtttttgggacaacgctgcttagatatggagtggaggtgatttactgctgaattaaaactcaagtgacacaagttacaagttgatatcgttgaatgaaaagcaaaacaaaaacaattcaggaacaacggctaattttttctaaagttaaatttagtgcactctgtcttaaaaatacgtttacagtattgggtacatacaagggtaaaaaaaaaattgtgtgtatgtgtgttggagcgatctttttttttcaaagtttgcttaataggttatacaaaaatgccacagtggccgcgtgtatattgttttcttttggtgacggggttttagtatatattatatatattaaaatttcttgattactgtaaaagtggaccagtatttgtaataatcgagaatgcctgggcattttacaaaacaagaaaaaaaatacccttttcttttccttgaaaatgttgcagtaaaatttaaatggtgggtctataaatttgttcttgttacagtaactgtaaagtcggagttttagtaaatttttttctgccttgggtgttgaatttttatttcaaaaaaaatgtatagaaacttgtatttggggattcaaaggggattgctacaccatgtagaaaaagtatgtagaaaaaaagtgcttaatattgttattgctttgcagaaaaaaaaaaaatcacatttctgacctgtacttatttttctcttcccgcctccctctggaatggatatattggttggttcatatgatgtaggcacttgctgtatttttactggagctcgtaattttttaactgtaagcttgtccttttaaagggatttaatgtacctttttgttagtgaatttggaaataaaaagaaaaaaaaaacaaaaacaaacaggctgccataatatatttttttaatttggcaggataaaatattgcaaaaaaaacacatttgtatgttaagtcctattgtacaggagaaaaagggttgtttgacaacctttgagaaaaagaaacaaaaggaagtagttaaatgctttggttcacaaatcatttagttgtatatattttttgtcggaattggcctacacagagaaccgttcgtgttgggcttctctctgaacgccccgaaccttgcatcaaggctccttggtgtggccacagcagaccagatgggaaattatttgtgttgagtggaaaaaaatcagtttttgtaaagatgtcagtaacattccacatcgtcctccctttctctaagaggccatctctaagatgtcagatgtagaggagagagagcgagagaacatcttccttctctaccatcactcctgtggcggtcaccaccaccacctctcccgcccttaccagcagaaagcaatgcaaactgagctgctttagtccttgagaaattgtgaaacaaacacaaatatcataaaaggagctggtgattcagctgggtccaggtgaagtgacctgctgttgagaccggtacaaattggatttcaggaaggagactccatcacagccaggacctttcgtgccatggagagtgttggcctcttgtctttcttccctgctttgctgctttgctctctgaaacctacattccgtcagtttccgaatgcgagggcctgggatgaatttggtgcctttccatatctcgttctctctccttcccctgcgtttcctctccatccttcatcctccattggtcctttttttttctttcattttttatttaatttcttttcttcctgtctgttcctcccctaatcctctattttatttttattttttgtaaagccaagtagctttaagataaagtggtggtcttttggatgagggaataatgcatttttaaataaaataccaatatcaggaagccattttttatttcaggaaatgtaagaaaccattatttcaggttatgaaagtataaccaagcatccttttgggcaattccttaccaaatgcagaagcttttctgttcgatgcactctttcctccttgccacttacctttgcaaagttaaaaaaaaggggggagggaatgggagagaaagctgagatttcagtttcctactgcagtttcctacctgcagatccaggggctgctgttgcctttggatgccccactgaggtcctagagtgcctccagggtggtcttcctgtagtcataacagctagccagtgctcaccagcttaccagattgccaggactaagccatcccaaagcacaagcattgtgtgtctctgtgactgcagagaagagagaattttgcttctgttttgtgtttaaaaaaccaacacggaagcagatgatcccgagagagaggcctctagcatgggtgacccagccgacctcaggccggtttccgcactgccacaactttgttcaaagttgcccccaattggaacctgccacttggcattagagggtctttcatggggagagaaggagactgaattactctaagcaaaatgtgaaaagtaaggaaatcagcctttcatcccggtcctaagtaaccgtcagccgaaggtctcgtggaacacaggcaaacccgtgattttggtgctccttgtaactcagccctgcaaagcaaagtcccattgatttaagttgtttgcatttgtactggcaaggcaaaatatttttattaccttttctattacttattgtatgagcttttgttgtttacttggaggttttgtcttttactacaagtttggaactatttattattgcttggtatttgtgctctgtttaagaaacaggcacttttttttattatggataaaatgttgagatgacaggaggtcatttcaatatggcttagtaaaatatttattgttcctttattctctgtacaagattttgggcctctttttttccttaatgtcacaatgttgagttcagcatgtgtctgccatttcatttgtacgcttgttcaaaaccaagtttgttctggtttcaagttataaaaataaattggacatttaacttgatctccaaa

SEQ ID NO: 294 - DNA, 1509 bp, Homo Sapiens
atggcttctaagaagttgggtgcagattttcatgggactttcagttaccttgatgatgtcccatttaagacaggagacaaattcaaaacaccagctaaagttggtctacctattggcttctccttgcctgattgtttgcaggttgtcagagaagtacagtatgacttctctttggaaaagaaaaccattgagtgggctgaagagattaagaaaatcgaagaagccgagcgggaagcagagtgcaaaattgcggaagcagaagctaaagtgaattctaagagtggcccagagggcgatagcaaaatgagcttctccaagactcacagtacagccacaatgccacctcctattaaccccatcctcgccagcttgcagcacaacagcatcctcacaccaactcgggtcagcagtagtgccacgaaacagaaagttctcagcccacctcacataaaggcggatttcaatcttgctgactttgagtgtgaagaagacccatttgataatctggagttaaaaactattgatgagaaggaagagctgagaaatattctggtaggaaccactggacccattatggctcagttattggacaataacttgcccaggggaggctctgggtctgtgttacaggatgaggaggtcctggcatccttggaacgggcaaccctagatttcaagcctcttcataaacccaatggctttataaccttaccacagttgggcaactgtgaaaagatgtcactgtcttccaaagtgtccctcccccctatacctgcagtaagcaatatcaaatccctgtctttccccaaacttgactctgatgacagcaatcagaagacagccaagctggcgagcactttccatagcacatcctgcctccgcaatggcacgttccagaattccctaaagccttccacccaaagcagtgccagtgagctcaatgggcatcacactcttgggctttcagctttgaacttggacagtggcacagagatgccagccctgacatcctcccagatgccttccctctctgttttgtctgtgtgcacagaggaatcatcacctccaaatactggtcccacggtcacccctcctaatttctcagtgtcacaagtgcccaacatgcccagctgtccccaggcctattctgaactgcagatgctgtcccccagcgagcggcagtgtgtggagacggtggtcaacatgggctactcgtacgagtgtgtcctcagagccatgaagaagaaaggagagaatattgagcagattctcgactatctctttgcacatggacagctttgtgagaagggcttcgaccctcttttagtggaagaggctctggaaatgcaccagtgttcagaagaaaagatgatggagtttcttcagttaatgagcaaatttaaggagatgggctttgagctgaaagacattaaggaagttttgctattacacaacaatgaccaggacaatgctttggaagacctcatggctcgggcaggagccagctga

SEQ ID NO: 295 - DNA, 867 bp, Homo Sapiens
atggccgagaagcggcacacacgggactccgaagcccagcggctccccgactccttcaaggacagccccagtaagggccttggaccttgcggatggattttggtggcgttctcattcttattcaccgttataactttcccaatctcaatatggatgtgcataaagattataaaagagtatgaaagagccatcatctttagattgggtcgcattttacaaggaggagccaaaggacctggtttgttttttattctgccatgcactgacagcttcatcaaagtggacatgagaactatttcatttgatattcctcctcaggagatcctcacaaaggattcagtgacaattagcgtggatggtgtggtctattaccgcgttcagaatgcaaccctggctgtggcaaatatcaccaacgctgactcagcaacccgtcttttggcacaaactactctgaggaatgttctgggcaccaagaatctttctcagatcctctctgacagagaagaaattgcacacaacatgcagtctactctggatgatgccactgatgcctggggaataaaggtggagcgtgtggaaattaaggatgtgaaactacctgtgcagctccagagagctatggctgcagaagcagaagcgtcccgcgaggcccgcgccaaggttattgcagccgaaggagaaatgaatgcatccagggctctgaaagaagcctccatggtcatcactgaatctcctgcagcccttcagctccgatacctgcagacactgaccaccattgctgctgagaaaaactcaacaattgtcttccctctgcccatagatatgctgcaaggaatcataggggcaaaacacagccatctaggctag

SEQ ID NO: 296 - DNA, 546 bp, Homo Sapiens
atggggaacatcttcgccaacctcttcaagggcctttttggcaaaaaagaaatgcgcatcctcatggtgggcctggatgctgcagggaagaccacgatcctctacaagcttaagctgggtgagatcgtgaccaccattcccaccataggcttcaacgtggaaaccgtggagtacaagaacatcagcttcactgtgtgggacgtgggtggccaggacaagatccggcccctgtggcgccactacttccagaacacacaaggcctgatcttcgtggtggacagcaatgacagagagcgtgtgaacgaggcccgtgaggagctcatgaggatgctggccgaggacgagctccgggatgctgtcctcctggtgttcgccaacaagcaggacctccccaacgccatgaatgcggccgagatcacagacaagctggggctgcactcactacgccacaggaactggtacattcaggccacctgcgccaccagcggcgacgggctctatgaaggactggactggctgtccaatcagctccggaaccagaagtga

SEQ ID NO: 297 - DNA, 2439 bp, Homo Sapiens
atgtctgagcaaggagacctgaatcaggcaatagcagaggaaggagggactgagcaggagacggccactccagagaacggcattgttaaatcagaaagtctggatgaagaggagaaactggaactgcagaggcggctggaggctcagaatcaagaaagaagaaaatccaagtcaggagcaggaaaaggtaaactgactcgcagccttgctgtctgtgaggaatcttctgccagaccaggaggtgaaagtcttcaggatcaggaatcaattcatttacagctttccagtttttccagcctgcaagaggaggataaatctaggaaagatgactctgaaagagaaaaagaaaaggataaaaacaaagataaaacctctgaaaaacccaagatcagaatgttatcaaaagattgcagccaagaatacacggattctacaggcatagacttacacgagtttctgattaacacattaaagaataattccagggacaggatgatacttttgaaaatggagcaggaaattattgatttcattgctgacaacaataatcattataaaaagttccctcagatgtcatcgtatcagaggatgcttgtccatcgagtggcagcttattttggattggatcacaatgtggatcaaacaggaaaatctgttatcatcaacaagaccagcagcaccagaataccagagcaaaggttttgtgaacatttaaaagatgaaaaaggtgaagaatcccagaagcggtttatcttgaagcgagataactctagtattgataaagaagacaatcagcaaaacagaatgcatccatttagagatgacagacgaagtaaatcaattgaagagagagaagaggaatatcagagagtgagggagagaatatttgcacacgattcagtttgctcccaggaaagcctttttgtggaaaacagtaggctcttggaagacagtaacatatgcaatgagacctataagaaaagacagctctttcggggcaacagagatggctcagggagaacatctgggagtcgacagagcagctcagaaaatgaactcaagtggtctgaccaccaaagggcctggagcagcacagactccgacagttccaaccgcaatctaaagcccgccatgaccaagacggcgagttttgggggcatcacggtgctgaccaggggtgacagcacttccagtactaggagtaccgggaagctgtccaaagcaggttccgagtcttccagcagtgcaggctcctcaggatcgctgtcccgcacccatccacctctccagagcacacccctagtctcaggtgtggcagctggctctccaggctgtgtgccttatccagagaatggaatagggggccaggttgctcccagcagcaccagctacatcctccttccacttgaagctgcaacaggcatcccgcctggaagcatccttcttaatccacacacaggccagccctttgtgaatcccgatggaactcctgcaatatacaacccacccaccagtcagcagcccctgcgaagcgccatggtggggcagtcccaacagcagccaccacagcagcagccctccccgcagccccaacagcaggtccagccaccgcagccacagatggcaggccctctggtcactcagagagatgatgtggcaacacagtttggccagatgaccctgagccggcagtcctcgggggagactcctgaacccccatcaggtcctgtctacccatcctcccttatgccacagccggcccagcagcccagctatgtaatcgcctctacaggccagcagcttcctacaggaggattctcaggctctggccctcccatctcccagcaggtcctccagccccctccctcaccacagggatttgtgcaacagcctccgcctgcacagatgcctgtatattattacccatctggtcagtaccctacctcaaccacgcaacagtaccggcccatggccccggttcagtacaacgctcagaggagtcaacagatgccacaggcagcacagcaagcaggttaccagccagtcttgtctggtcaacagggattccaaggcctaataggagtgcagcagccacctcagagtcagaacgtgataaataaccaacaaggaactccggtgcaaagcgtgatggtttcctacccaacaatgtcttcttatcaggtgccaatgacccagggttctcaaggactgccccagcagtcataccaacagccaatcatgctacctaaccaggcaggtcaagggtcactcccagccactggaatgcctgtttactgtaatgtcacaccgcccacccctcagaacaaccttaggctgattggcccacactgcccctccagcactgtcccagtgatgtcagctagctgcagaacaaactgtgcaagtatgagcaatgctggttggcaggtcaaattctga

SEQ ID NO: 298 - DNA, 912 bp, Homo Sapiens
atgaagggcaaggaggagaaggagggcggcgcacggctgggcgctggcggcggaagccccgagaagagcccgagcgcgcaggagctcaaggagcagggcaatcgtctgttcgtgggccgaaagtacccggaggcggcggcctgctacggccgcgcgatcacccggaacccgctggtggccgtgtattacaccaaccgggccttgtgctacctgaagatgcagcagcacgagcaggccctggccgactgccggcgcgccctggagctggacgggcagtctgtgaaggcgcacttcttcctggggcagtgccagctggagatggagagctatgatgaggccatcgccaatctgcagcgagcttacagcctggccaaggagcagcggctgaacttcggggacgacatccccagcgctcttcgaatcgcgaagaagaagcgctggaacagcattgaggagcggcgcatccaccaggagagcgagctgcactcctacctctccaggctcattgccgcggagcgtgagagggagctggaagagtgccagcgaaaccacgagggtgatgaggacgacagccacgtccgggcccagcaggcctgcattgaggccaagcacgacaagtacatggcggacatggacgagcttttttctcaggtggatgagaagaggaagaagcgagacatccccgactacctgtgtggcaagatcagctttgagctgatgcgggagccgtgcatcacgcccagtggcatcacctacgaccgcaaggacatcgaggagcacctgcagcgtgtgggtcattttgaccccgtgacccggagccccctgacccaggaacagctcatccccaacttggctatgaaggaggttattgacgcattcatctctgagaatggctgggtggaggactactga

SEQ ID NO: 299 - DNA, 7730 bp, Homo Sapiens
gtcggctgacgtggagggccggaggtggcggcggcggcggcggcggctgctgctgctgctgcccgcgtccgaggctcgcgggcggcgggcccggacttgtgcaccatggacaattttgctgagggagatttcactgtggcggattatgccttgttagaagattgccctcacgtggatgattgtgtctttgctgctgaatttatgagcaatgattatgttcgtgtgactcagctttactgtgatggggtgggtgtgcaatataaagattatatccaaagtgagaggaatttggaatttgacatctgcagtatatggtgtagtaaaccaatttctgtcctgcaagattattgcgatgccattaaaataaacatcttctggccacttctgtttcaacatcaaaacagttccgtaatatcacgattgcatccctgtgtggacgccaacaattcacgtgcttctgagataaatttgaagaaactacaacatcttgagttgatggaagatattgtggatttggcaaagaaagttgctaatgattcattccttattggaggcttattgagaattggttgtaaaatagaaaataaaatcttggcaatggaagaagctctgaattggataaaatatgcaggcgatgtaacaattctaactaaattaggatcaattgacaattgttggcctatgttaagtattttctttactgaatacaagtaccacataactaaaattgtaatggaagactgcaatttgcttgaagaacttaaaactcaaagttgtatggattgtatagaggaaggagaactaatgaaaatgaaaggaaatgaagagttttccaaagaaagatttgatatagctattatctattacaccagagccattgaatatagacctgaaaactaccttctttatggtaaccgagctctttgttttcttcgtactggacagtttagaaatgcactcggtgatggaaagagagccactattctgaagaacacttggccaaagggtcattatcgttattgtgatgctctttctatgctgggggaatatgactgggccctgcaagcaaacataaaagctcaaaaactctgtaaaaatgaccctgagggaatcaaggatctaattcagcagcatgtaaagttacaaaaacaaatagaagacctacaaggtcgaacagcaaataaggatccaattaaagccttttatgaaaacagggcctacacacctaggagtttatcagcacctatatttactacttcacttaactttgtggagaaggaaagagatttcagaaaaattaatcacgaaatggccaacggtggtaatcagaatctaaaggtggcggatgaggcgttgaaggtagatgattgtgactgtcatcctgaattttcaccaccatcaagtcagcctccaaaacataaaggaaaacaaaaatctcgaaacaatgaatcagaaaagttcagttctagttcaccattgactttaccagcagatttgaagaacatcttggagaaacagttttctaaatcttccagagctgcacaccaggattttgctaatataatgaaaatgctgagaagcttaattcaagatggctatatggccttattggagcagcgttgccgcagcgctgcacaggcctttacagagttgctgaacggtttagatcctcaaaaaataaagcaattgaacctggccatgattaactatgttttggtcgtctatggacttgccatttctctccttggaataggacagcctgaggaattatctgaagccgaaaaccagtttaagaggattattgaacactaccccagtgagggccttgattgcttggcctactgtggaattggaaaagtatatttgaaaaaaaacagatttctagaagctctcaatcactttgagaaagcaagaaccttgatttatcgtcttcctggagtgttaacttggcccacgagtaatgtgattattgaagagtctcagccacaaaaaataaagatgctgttagagaaatttgttgaagaatgcaagttccctccagtgccagatgccatttgttgctatcagaagtgccatggatattctaagatccagatatacataactgatccagactttaagggttttatacgcatcagctgttgccagtactgtaaaatagaatttcacatgaattgctggaagaagttaaaaactacaacctttaatgataaaattgacaaggattttctacaaggaatatgtcttacccctgactgtgaaggtgtcatttctaagattatcatcttcagcagtggtggtgaagttaaatgtgaatttgaacacaaggtcataaaagaaaaggttcctccaagacctattctgaaacagaaatgttctagcctagagaaactaagactgaaagaagacaaaaaattgaagagaaagatccaaaaaaaagaagcaaaaaagttagcacaagaaagaatggaggaggacttaagagaaagtaatccacccaaaaatgaagagcagaaagaaactgtagacaatgttcagcgttgtcagttccttgatgacagaattctacagtgtataaagcagtatgctgacaagattaaatccggcatacagaatacagccatgcttctcaaagaattgctttcttggaaagttttgagcacagaagactatacaacctgtttttctagcagaaattttctaaatgaagcagtggactatgttattcgccacttgattcaagaaaataacagagtaaagacaagaatatttctgcatgttttgagtgagcttaaagaagtggagcccaaattagccgcctggatccaaaaacttaatagctttggcttagatgccacaggaactttcttttctcgttatggagcatctcttaaactgcttgattttagtatcatgactttcctctggaatgagaaatatggtcacaaactagactctatagaaggaaagcaacttgattatttctctgagccagcatcattgaaggaagcccgttgtttaatatggctgctagaagaacacagagacaagttcccagcattgcatagtgctttagatgaattctttgatataatggacagccgctgtactgtgttaaggaaacaagatagtggtgaagcaccgtttagttcaaccaaggtgaaaaacaaaagcaagaaaaagaagccaaaggattcaaagcctatgttagttgggtctggaacaacttcagtaacttcaaataatgagatcatcacttcaagtgaagaccatagcaatcgaaattcagattctgcaggcccatttgcagtgcctgaccatcttcggcaagatgtagaagaattcgaagctctctatgaccaacacagtaacgaatatgttgtccgcaataagaagctatgggacatgaacccaaaacaaaaatgttcaactctatatgattacttctctcagtttttggaggaacatggtcccttggacatgagtaacaagatgttctctgcagaatatgagtttttcccagaagaaactcgacagatactagaaaaagcaggaggtttaaaaccttttctcttgggatgccctcgttttgttgtgattgacaactgtattgcactgaagaaggttgcatcacggctcaagaaaaaaaggaagaagaaaaacattaaaacaaaagtagaagaaatttcaaaagcaggggagtatgtacgagttaaactacaactgaatccagctgctagggaatttaaaccagatgtaaagtctaaaccagtgtcagattcatcttcagcaccagcttttgaaaatgtgaaacccaaacctgtgtctgcaaattctcccaagccagcttgtgaagatgtgaaggccaaaccagtatccgacaattcttctagacaagtttctgaggatgggcaacccaaaggggtctcttctaattctcctaaaccaggctctgaggatgcaaattacaagcgagtctcctgtaattcccccaaaccggttcttgaggatgtgaaaccaacttattgggctcaatcccatttggtcacaggatactgtacgtatcttcctttccagagatttgatatcacccagacaccgccagcatacataaacgtgttaccaggtttgccccagtacaccagcatatatacacccttggccagcctttctcctgaatatcagctaccaagatcagtaccagtggtgccgtcttttgtagccaatgacagagcagataaaaatgctgctgcctattttgagggtcatcatttgaatgctgagaatgttgctggtcaccagattgcctctgaaacacagatccttgagggctctttgggaatatctgtaaagtcacactgcagcacaggtgatgctcatacagtcctgagtgagtctaacagaaatgatgagcactgtggaaattctaacaacaaatgtgaagtaattccagaaagcaccagtgcagtaacaaacattccacacgtgcagatggttgccatacaggtatcttggaacataatacaccaagaagtcaatactgagccatataatccttttgaggaacgacaaggggaaatttcacggattgaaaaggagcaccaagtattacaagaccaacttcaagaagtgtatgaaaattatgagcagataaaacttaagggcttagaagagaccagggacctggaagagaagttgaaaaggcacttagaagaaaacaagatctcaaagacggaattagattggttccttcaagatttggaaagagaaattaaaaaatggcaacaggaaaaaaaagaaatccaagaaagactaaaatcactgaagaagaaaattaaaaaggtttcaaatgccagtgaaatgtatacccagaaaaatgatggaaaggaaaaggaacatgaattacatctggatcagtcccttgaaatcagcaacacacttacaaatgagaaaatgaaaatagaagagtatataaagaaagggaaagaggattatgaagagagtcatcagagagctgtggctgcagaggtatccgtacttgaaaactggaaggagagtgaagtgtataagctacagatcatggagtcacaagcagaagcctttctgaagaagctggggctgattagccgtgatcctgcagcatatcctgacatggagtctgatatacgttcatgggaattgtttctttctaatgttacaaaagaaattgagaaagcaaagtctcagtttgaagaacaaattaaggcaattaaaaatggttctcggctcagtgaactttctaaagtgcagatttctgagctttcatttcctgcctgtaacacggttcatcccgagttactccctgagtcttcaggcgacgatggccaagggcttgtgacttctgcaagcgacgtgactggaaaccacgcagcacttcacagggatcctagtgtgttctctgctggtgattccccaggggaggctccttctgcgctgttgccagggccaccccctggtcagcctgaagccactcagctgacagggccaaaacgggctggccaggcagctctgtcagaacgaagccctgtggctgatcggaagcagcctgttcctccaggacgtgctgcgcgttcaagccagtctccaaaaaagccgttcaatagtattattgagcacctgtcagtggtattcccatgttacaacagcactgagcttgctggttttattaaaaaagtgcgaagcaaaaacaagaactcactctcaggattgagtattgatgaaattgtccaaagagtgacagaacacattctagatgaacagaaaaagaaaaagccaaacccaggaaaggacaagaggacttatgagcccagctctgccacccccgtgaccaggtcctcccagggctcaccctcggtggttgttgcaccatcacccaaaaccaaggggcagaaagcagaagatgtccctgtgaggattgcactgggtgcaagttcctgtgaaatatgccacgaggtgttcaaatcaaaaaacgtgcgtgtgctcaaatgtgggcacaagtatcacaaagggtgctttaagcagtggcttaaagggcagagcgcttgcccggcctgccagggtcgtgatctcctgacagaagagtcaccttctggaagaggctggcccagtcagaatcaggagctgccttcctgctcttctaggtagtcacacttcactaaagtgtcatccaccagtgtgttgaatccgaagaatgacaattttctaccactggtgtaaaaaacaaacatttgaagacccttgtgcattgtgtgtcacaaagctaaatacatggaaatcgttaatatcgctgatattaagtaatttccccactctgagtgaatactttgatgattgccaacagtggctaataaaatgacggctaccacactcatgggtcactggggctgcgcagggctctttgaggtgggtggcttcttttggaaagtactatgaacgtctcgaagcagtattctagtgataagaattcttaacatagccaagcgccccacgtttgttccccacgtttgttccccttttctgtttgaaaaacctgttctggtagctccacaagagagatgatactgactttttaaattttttacaagagtctgtattcctgatatgcctatatttttcctcaaagattctgcattttaaggatgggcataagcaaactatattttaataatttatagttaatgttaaaatattggctgatttagaccaaaagattcaaatctcctctttgtgaaatcccatctgcatttgattttttattattttatgttcccccgttagattgttttaagtgtttgcttttcatcttttatagatgtaatctgattttcaaaaatcattaacactttttaattagtatcgactaagactttttccccctggaatcgaggctgtgtgtccgtcatcccagcccccggttggagcctgctctttgaactccgctgccttccttagcagcttctgtcctcttctgtgagtcagtcagcgagtgcttgggatccgcatccagccgtgctgagcacacaacaggctgtgtgtggaaatggccaccaccattctccttccccaccccaccacaaaaagagaagctgtgtctttagacaaccctgaggtatctgtgttacaatcgttctgtgtttgatatttgtgtaaagtatgcatgcagtcttgtactgtgacctaagaacaaaactgtaactgcattagaaaccatgaaaaaattagatattgttttgtgacttttagacagtggtaaatatagaaccatgaattctggtcacattccatttctctccaacatgaaggatcaaaaaatgtttttcaatgtgttctttgttccactggaaacttagagtcatgagtttatgagctgatttggtcaccttcctctgcctttgttcactgtgagttctgatgtcttagtgacttagttcttagaagctcacgccttagtttgaaacagattctccacggtggtccccaaaacactgtctgcatatccataagaattgagcgctatgggtgttaacgtgcatgaggatcagtttgcagcagcaagtacaaaaggagaagaggaacatccgttgaatgagtgtgttttgtacataacttcagatacttgtgaacatgccttatatttgtccaacaactgtcagaataaagaacattctaaaatgagaaaaaaaaaaaaaaaa

SEQ ID NO: 300 - DNA, 2356 bp, Homo Sapiens
gacacacgcgaggcgctgtcctttcagcaccacaagctcgggctgaggagggaggactcctggccgtcctcctcctcttcaaattggcttgaatcttctctgaccccccacgagtgcagcacagtctgggaagaaaggcgtaaggatggtgaagctgaacagtaaccccagcgagaagggaaccaagccgccttcagttgaggatggcttccagaccgtccctctcatcactcccttggaggttaatcacttacagctgcctgctccagaaaaggtgattgtgaagacaagaacggaatatcagccggaacagaagaacaaagggaagttccgggtgccgaaaatcgctgaatttacggtcaccatccttgtcagcctggccctagctttccttgcgtgcatcgtgttcctggtggtttacaaagccttcacctatgatcacagctgcccagagggattcgtctataagcacaaacgctgtatcccagcctccctggatgcttactactcctcccaggaccccaattccagaagccgcttctacacagtcatcagccactacagcgtggccaagcagagcactgcccgggccatcgggccgtggctgtcagcagccgctgtcatccatgagcccaagccgcccaagacccagggccactagaggcctgccccagccagaatggggggcggggtggagaggaggacccccattggctaagccaagctccagttacaagacaacactgtactcctgggatatgggggcgggggcggggcagggcagggtggggggaagaacgcaccaaaaacgtggtgtgtgctggagttgtctgaaccgatatttctttttgttccttggtattgttgattcgtcgccgagtcaggctcatgtacaaaggcatgtttcgtgttgattgttcccatgtaagatatttttaaagccactgcttattctttgttaggaaaatgtaacagcagaaaaggaaagaaacaaagaacatgaacaaaaagcattaaactggctccatcggaagacgttgaagggcagtgaagagcacagactctgtgggcttcttagataagaaaacgtagcttcagtgggggctccagggttgcagagtatgagtgacacagaccgggactattccattagcctgtggtctgcagggtaggcccgcaggaaatgaggaatggccaagctggagagaagagctgattttggcattactaagcccagaatgcacataacccatagtgaaatgtgctggcctctggtgcattttgcaagatgagcacaaactttctgggcctccatcctaggacctgggcagacccacatggcctgggctctgaatgcccaccctgcgacggtgggttctgcatcagcaaacgctgaggagtgggcagattttctttgtcttttgcttgcattttctagatccacacctggatactgcccatgttgacgagacagcagcagggggagagggagggaaggaaggtgcggctgcaagaaggaaggcacgggacaggcatgtgacactaggccacaagcgataagcacaggcacctgacttttaagtttttgtttgtttgttgtttcccaaagtgctgataacaataacaacaacaataggattccaaccaggagcctcaagtgacagccaggaagagacctgaaggttggggccaccacaatgccaaatcgtttctaaaggaagctgaaaaatgggactgtcttttgcccacttcgttgtgttaaaaggggacatttgtccaaactccccaaccgagttctagaagctcctgacaaggaggcagcatccagccttgaccaggcctcccagttccctggaaccgtatcaggcattcccctgcctctcacaaatgtttcagggaggccagttctgcagggtgtcagctccaggacccacagggccagaaccagctgggagaattggttatttgagatgtggtactgcttcctcacaagtctcccacaggccatgtaaagggtatttttttgtggcttgctgtgttgctgagatcatcgtatgcaacagctgggtaataagactagcatagctcaaactatcctgccaaacgctctcatctgatttttcctcccttctcccccaacctccaatcaccctgagtcacctgtaaattcatttgtcattcaaagcggaataacaagttgtccctagcaaaaccgctgagcgctttataattttgtggtgtatttttgtcagtaggtagcagaggcggaagtattttttggtgtaattcttgaaattttctgacaggaaacaaataaagatagatgtgtctgagaaaaaaaaaaaaaaaaaaaaaa

SEQ ID NO: 301 - DNA, 2944 bp, Homo Sapiens
agatagactgaagaggagcaagaacagaaacagggagccagttacagatctatcccaagaattctggggagagatgatggtgtctgcagcagagtgacagcagtggagattgagagaaaaggttgaaaatggttgcttgtgttcaactactgtgaagagttggaatcagacaactacggctttgattttccaagtggttcagaatgtaaatatgatctgacctttccctgatggacagttaaatcatggacacgctaaacaatttactttggactgtccttcctaaagatgctctggcttctctcttgaatgctcactaagcttttgtagctgacaaggaaaggaaggaaaactgtgaactggaaagttatcttacaatgaaaattactagcacatcttgcatctgtccagtcctagtgtgtctctgttttgtgcagaggtgttatggaactgctcaccacagctccatcaaggtgatgagaaaccaaaccaaacacattgaaggtgaaaccgaagtccatcatcgtcccaaaaggggatgggtatggaatcagttctttgttttagaagaacatatgggaccagatcctcagtatgttggaaagctgcactccaattctgacaaaggtgatggatctgtcaagtacatccttactggagagggtgctgggactatatttatcattgacgataccacgggtgatatccactcaacaaaaagcctagacagagagcagaagacccactatgtgcttcatgctcaagctattgatagacgtacaaacaaacctcttgagcctgaatccgagttcatcatcaaagtgcaagacatcaatgacaacgctccaaaattcacagatggaccatacattgttactgtgcctgaaatgtcagatatgggtacctctgttctacaggtgacagctactgatgcagatgaccctacctatggaaacagcgctcgggtggtttacagcattctccaaggacaaccctacttctccgtcgaccctaaaacaggagttattagaacggccttacataacatggacagagaagccagagaacattactccgtagtcattcaagccaaagacatggctgggcaagttggagggctttcaggatctacaacagtcaacatcaccttaaccgatgtcaatgacaacccaccacgctttcctcaaaaacactatcagctatatgttcctgagtcagctcaagttggttcagctgttgggaaaatcaaggcaaatgatgctgacactggctcaaatgctgacatgacctactccatcataaatggtgatggcatgggaatattctcaatctccactgacaaagagaccagagaaggaatcctttctttaaagaagccactgaactatgagaaaaagaagtcatataccctcaacatagaaggagcaaatacacatcttgattttcgcttttctcacttgggtccttttaaagatgctactatgctgaagatcattgttggggatgtagatgaaccaccactattttccatgccttcctacctcatggaagtctacgaaaatgccaagattgggaccgtcgttggtacagttttggcacaagatcctgacagtactaacagcttagtaagatacttcatcaactacaatgttgaagacgacagatttttcaacattgatgccaatactgggaccattaggactacaaaggttctcgacagagaagaaactccatggtacaacatcacagtcactgcttcagaaattgataatcctgatttgctgagccatgtcacagtgggtattagagttctggatgtcaatgacaatccacccgaacttgccagggaatatgatattattgtatgtgaaaattctaagcctggccaggttattcataccatcagtgccactgataaagatgattttgccaatggaccaaggtttaacttctttcttgatgaacgcctgcctgtaaatccaaacttcactctgaaggacaatgaagataacacagccagcattctgacaaggcggaggagatttagtcgaactgttcaggatgtgtattatctgcccattatgatctctgatggtggaatcccctctctcagcagcagcagcaccctcaccatcagggtttgtgcatgcgagagagatgggcgtgtgcggacctgccatgcagaagccttcctgtcctcggctggtttgagtacaggagccttaatcgctattcttctctgtgttctcattctcctggcaattgtggtactttttatcaccctgaggcgcagcaaaaaagagcccttgatcatttcagaagaggatgtacgggagaacgtggtcacctatgatgatgaaggaggcggagaggaagacacagaggcctttgacatcacagccttgaggaatccttctgctgctgaggagctcaagtaccggagggatatcagacctgaagtgaagctcactcccagacaccagacatcatccaccctggaaagcatagatgttcaggaatttattaagcaaagactggcagaagcagacctagaccctagcgttcccccttatgactctcttcagacttatgcctatgagggtcagagatcagaagctgggtctatcagctcgctggattcagcaacgacacaatcagaccaggattatcactaccttggagactggggacccgagtttaaaaagttagctgaactctatggagaaatagaatctgaaagaacaacttagggggtcagttcttgcaaccttgtggaatttgcttcctgagtaagtggatatacaacctcagcaatgacaaggaagaagtgtggaaacagtacttggaactgaggaagctggacacagctcctgtagaaacaagtgcccttttcatgatcgaaactgggttatttaattggaagaaagtaaaaaaaaaaaaaaaa

SEQ ID NO: 302 - DNA, 1942 bp, Homo Sapiens
gagcatggaggcgggggcggctgaggcagctgtagcggccgtggaggaggtcggctcagccgggcagtttgaggagctgctgcgcctcaaagccaagtccctccttgtggtccatttctgggcaccatgggctccacagtgtgcacagatgaacgaagttatggcagagttagctaaagaactccctcaagtttcatttgtgaagttggaagctgaaggtgttcctgaagtatctgaaaaatatgaaattagctctgttcccacttttctgtttttcaagaattctcagaaaatcgaccgattagatggtgcacatgccccagagttgaccaaaaaagttcagcgacatgcatctagtggctccttcctacccagcgctaatgaacatcttaaagaagatctcaaccttcgcttgaagaaattgactcatgctgccccctgcatgctgtttatgaaaggaactcctcaagaaccacgctgtggtttcagcaagcagatggtggaaattcttcacaaacataatattcagtttagcagttttgatatcttctcagatgaagaggttcgacagggactcaaagcctattccagttggcctacctatcctcagctctatgtttctggagagctcataggaggacttgatataattaaggagctagaagcatctgaagaactagatacaatttgtcccaaagctcccaaattagaggaaaggctcaaagtgctgacaaataaagcttctgtgatgctctttatgaaaggaaacaaacaggaagcaaaatgtggattcagcaaacaaattctggaaatactaaatagtactggtgttgaatatgaaacattcgatatattggaggatgaagaagttcggcaaggattaaaagcttactcaaattggccaacataccctcagctgtatgtgaaaggggagctggtgggaggattggatattgtgaaggaactgaaagaaaatggtgaattgctgcctatactgagaggagaaaattaataaatcttaaacttggtgcccaactattacggggtctggctctgtcacccaggctggagtgcagtggcacgattatggctcattgcagcctcgacttctcggggccaagcgatcctcctgcctcagccttctgagtagctgggaccacaggcgtgcaccaccatgcccacctaattttttatttcttgtagagatgaggtctcctgcctcagcctcccaaagtgctggaatttacaggagtgtcggctgtgccccttgtgatggatgaggaaaggtatccacctttctgaatcagacacaagctgcagtagcttcctgatgcctcattcaccaggatgggtaactttaaagacaagttttataactggcatcccatctggtttcagagtcttgggggcttttttcatacagctttgtctgatatttagagacattcagattcagaagccatgagttcagttagctcatgggccgggcacgtgcactgactcactggctgcagcagaacacattgagggagtcttggtgcacttaggtcactgtaaggttctagggctgggagctgggatttgaaccaggatctgtcagcgcagccccagtgctgtgcttgaagcctcgtgccacactggctttgaggtagcacgctgcaagttagtgagtggagttgcccaagtctggggcttctgaaatgacctggtatttttatgttcctgttagaaatggtgtggctttcacaaattaagtgccaggctgggcacaatggctcgtgcttgtaatcccagcactttgggaggcggaggcaggcgggttgcttgagctccggagcttgagaccagcctgagcaacatggcgaaacctcatatctacaaaaaataaaaaattaactggtcaaaaaaaaaaaaaaaaaaaaaaaaaaaaaaaaaaaaaaaa

SEQ ID NO: 303 - DNA, 2488 bp, Homo Sapiens
atgacgcagggtccgggcgggcgcgcgcccccggcgccccccgcgccccccgagcccgaggcgcccaccaccttctgcgcgttgctgccccgaatgccgcagtggaagttcgcggccccgggcggcttcctgggccgcggcccggcggcggcgcgggcggctggggcctcggggggcgcggacccccaacccgagccggcgggcccggggggcgtcccggcgctggcggccgccgtcctgggcgcctgcgagccccgctgcgccgcgccctgtcccctgcccgcgctcagccgctgtcggggcgcggggtcgcgggggtcgcggggcgggcggggggcggcggggtccggggacgccgccgccgccgccgagtggatccggaagggcagcttcatccacaaacccgcgcacggctggctacaccccgacgccagggtcctggggcccggggtctcctacgtcgtgcggtacatgggctgcatcgaggttctccgctctatgcgctccctggactttaacacgcgcacgcaggtgaccaggtgagcctccaaccctgccctggccgcgtagggctgagtgacgcactggagggcggcagcactggagggcggcagcgatgggctctccgacagccgcgctggggtcccaggacgcagcctcggtgccccccacctccctcccacttcacgccacgtctccgccctgtccccacgccaggtgtcgtcacgatctcactcactcatgatctcactcactcatgatctcactcatgatctcactcactcatgatctcactcaggatctcactcactcactcaatcacaggctcacaatggggcgccgtgtatctgcccggcctcctctatctctcactcactatctcactcgatctcactcacgatgaagcgccatctatctgccccgcctcctctatctctcagtccggaggccttccctgaggaagcggcatttgggtagagccctgactggtgaataggagctgcctgggagagcagagcggggaaggttatccaggcagggggaacagccattgcaaggtggggcttgcacacaccggggaacctctcactgctctgtttccagggcccatctccttctctaagagatgcctgcagcctgccatgggacgtggggtccaccggtacagctccaccgggggacggctacgtgcaggcggacgcccggggccccccggaccacgaggagcacctgtatgtcaacacccagggtctggacgcccccgagccggaggacagccccaaaaaggatctgtttgacatgcgaccctttgaggatgccctgaagttgcatgagtgctcagtggcggcaggcgtgacagcagcccctcttcccttggaggaccagtggcccagcccccctacccgccgggcccctgtggcccccacggaggaacagctgcgtcaggagccctggtaccacggccggatgagccgccgggcggcagagaggatgcttcgagctgacggggacttccttgtgcgagacagcgtcaccaaccccgggcagtatgtcctcaccggcatgcacgccgggcagcccaagcacctgctgctcgtggaccccgagggcgtggtacggacgaaggacgtgctgtttgagagcatcagccacctgatcgaccaccacctgcagaacgggcagcccatcgtggccgccgagagtgagctgcacctgcgtggcgtggtctcacgggagccctgagccaggtgaccgttctcagccctggctcctgcctgttctcagccccagctcctgcctgtcatggccttggggctctcagccctcctcctggatcctggtcaggccgaaccaccgctgcctctccttcctccgcatgagcctctggcatggtccttcctccagctggccccgggctgggcagagcctcctcctgccggggcccctgcccaccccctcctttgcctggagtgagggtgttcataccaaagacggaaccatttcgcctttaaagaaaatatatccagaagcagccgctgcctcggagccctggcccgtgggtccccctctcgcctggctggttcggtctaacgccccggagagtcagagctcccaggaccctggggaggaggcggattccgggcctggctgggcttcctcttcccacctgaggactgggtgcacagttgtctttgaggggggacgcttaaggtgctttggggttctcaggccaggatacatgctggcgctgaagtgcaggcagccttgaggtcacctgggatctcggggtagccaggctgctccaagacagtggatatcgaggcagtcgtgaggcccctactccacctgggagcaggggaaggacgtggttgcctggcctgggctgcgcccagcagcttccccccaatcctgccctcccagctgtcgacccagatgggatgttcggatcggtttgtaattaaacctgggaatggccacaagagcacaa

SEQ ID NO: 304 - DNA, 2154 bp, Homo Sapiens
tgccatcttggactcgggctgagtaataaattccccccgcaccgaaacgcggtctttctctagacgcgtcttgctgggagagtgtccgttgcttcccgtccgtgtcgcggccctgcggttggcggcctcctcgtggagcggagcaaggccaggcggcccctgctcgagtcccgcgtcgccatggccgcggttcccgagttgctgcagcagcaggaggaggaccgcagcaagctgagatctgtatctgtggacctgaatgttgatccctcgcttcagattgacatacctgatgcgctcagtgagagagacaaagtcaaatttacagtgcacacaaagaccacactgcccacgtttcagagcccagagttttctgttacaaggcaacatgaagactttgtgtggctacatgacactcttattgaaacaacagactatgctgggcttattattccacctgctcctacgaagcccgactttgatggtcctcgagagaagatgcagaaactgggagaaggtgaagggtctatgaccaaagaagaatttgccaagatgaaacaagaactggaagctgagtatctcgctgtgtttaagaagactgtgtcctcccatgaagtctttcttcagcggctttcttctcaccctgttctcagtaaagatcgcaactttcatgttttcctggaatatgatcaggatctaagtgttaggcggaaaaatactaaagagatgtttggtggcttcttcaaaagtgtggtgaaaagtgctgatgaagtcctttttactggagttaaggaggtagatgacttctttgagcaagagaagaacttccttattaactattacaataggatcaaagattcttgtgtgaaagctgacaaaatgaccagatctcataaaaatgttgccgatgactatatccacaccgcagcctgcttacatagcctggctttagaagagcccacagtcatcaaaaagtacctattgaaggttgctgagctatttgaaaaactaaggaaagtagagggtcgagtttcatcagatgaagatttgaagctaacagagctcctccgatactacatgctcaacattgaagctgctaaggatctcttatacagacgcaccaaagccctcattgactatgagaactcaaacaaagctctggataaggcccggttaaagagcaaagacgtcaagttggctgaggcacaccagcaggagtgctgccagaaatttgaacaactttccgaatctgcaaaagaagaactgataaatttcaaacggaagagagtggcagcatttagaaagaatctaattgaaatgtctgaactggaaataaaacatgccaggaacaatgtctcccttttgcagagctgtattgacttgttcaagaataactgatatgccttcactcagaagaaaagaaatgaatgtgaaagaaagccaagcatcacttgcacttaaatcattaccacggaagatatattagcttcaactttagtttaaaattatgtgaataaatattttgatttctacaaatcttaacatttaaccatgttggtttaaaaatattattgcttgctacttggacataactaatttttccttgtgcatttaatacctctgggcagaatccaaatactgggttctcccgtagttcgtctttagttactaagaaagggtgtaggacacattagccttctggaaacaagtagaagccatcacctggcccatgtccctacaaacccatgattgtcagggaggtgccagttacagcaggtgattcagctacttgaggtcggtaacagaccttccattcctcactgaaggtggggtttgtgtttttgttttgccctgttactccactggtagtcatctggtgtttgtactataacaacagcaagaaaatctcatttatctttatatactctttgcacctcctttttttagtcgagatataaatatttgaggggagagaaatatctacaggtatatatggaaacaaataatgtggtctgctttataagatggccagatctacattaggaaaagtataagccccctccctaatggccgctggggggtgagggcggtgtgttgtatgtctttgggtgtttgtttttttataaagcatataataaaataatcgtgctactaaaa

SEQ ID NO: 305 - DNA, 1313 bp, Homo Sapiens
gtcaagatggcgggagcagctacccaggcttccctggagtcggccccacggatcatgcggctggtggccgaatgcagccgctccagggcccgggcaggcgagctgtggctgccgcatgggacagtggccactcctgtgttcatgccagtgggcacgcaggccaccatgaagggcatcacgaccgaacagctggacgctctgggttgccgcatctgcctgggcaatacctaccatctgggtctaaggccgggacccgagctgatccagaaagccaacggtctccacggcttcatgaattggcctcataatctgctaacggacagcggcggtttccagatggtgtcgctggtgtctctgtccgaggtgacggaggagggcgtccgcttccgctccccctacgacggcaatgagaccctgctgagcccggagaaatccgtgcagatccagaatgcgctgggctcggacatcatcatgcagctggacgacgtggttagcagtactgtgactgggccacgtgtggaggaggccatgtacaggtcaatccgctggctggaccggtgcattgcagcccatcagcggccggacaagcagaacctcttcgccattatccagggtgggctggacgcagatctccgggccacctgccttgaagagatgaccaagcgagacgtgcctggcttcgccatcgggggcctgagcgggggtgagagcaagtcgcagttctggcggatggtggcgctgagcacctctcggctgccgaaggacaagccccgatatctgatgggggttggctatgccactgatctggtagtctgcgtggctcttggatgtgacatgttcgactgcgtcttccccacacggacagcgcgctttggctctgccctggtgcccactgggaacctgcagttgaggaagaaggtgtttgagaaggacttcggccccatagacccggagtgcacctgccccacgtgccaaaagcacagccgcgccttcctgcacgcactgctgcacagtgacaacacggccgcgctgcaccacctcacggtccacaacatcgcctaccagctgcagctcatgagcgccgtccgcaccagcatcgtggagaagcgcttcccggacttcgtgcgggacttcatgggcgccatgtacggggatcccaccctctgtcccacctgggccactgacgctctggcctctgtgggaatcacacttggctgacctggcattgggagagggagggaggaaggaagggagggaggggctggaagatactgaaggattcctttttgaaaggtttttttttattgtaactt

SEQ ID NO: 306 - DNA, 5456 bp, Homo Sapiens
cgccggggcgagttcctgcagggtggacccggcgatcaggtctccgcggtgccactttgggcgcgggcgggaagccgggacgctccgcacctgcagcgaccttgggctccgcggaccgggcgcgggcacctgtggctgcgtcctatggcgcacgtggaggcggaggctccggggagccgccggggccgcctgtgagccggagagcggaggaggcaccggcgcgcacgatgtcgttccttgaagaggcgagggcagcggggcgcgcggtggtcctggcgttggtgctgctgctgctccccgccgtgcccgtgggcgccagcgttccgccgcggcccctgctcccgctgcagcccggcatgccccacgtgtgtgctgagcaggagctgaccctggtgggccgccgccagccgtgcgtgcaggccttaagccacacggtgccggtgtggaaggccggctgtgggtggcaggcgtggtgcgtgggtcatgagcggagaaccgtctactacatgggctacaggcaggtgtataccacggaggcccggaccgtgctcaggtgctgccgagggtggatgcagcagcccgacgaggagggctgcctctcggctgaatgcagcgccggcctctgttttcacggtggccgttgtgtgccaggctcagcccagccgtgtcactgtccccccggcttccagggaccccgctgtcagtatgatgtggacgaatgccgaacccacaacggtggctgccagcaccggtgcgtgaacaccccaggctcctacctctgtgagtgcaagcccggcttccggctccacactgacagcaggacctgcctggccattaactcctgcgccctgggcaatggcggctgccagcaccactgtgtccagctcacaatcactcggcatcgctgccagtgccggcccgggttccagctccaggaggacggcaggcattgtgtccgtagaagcccgtgtgccaacaggaacggcagctgcatgcacaggtgccaggtggtccggggcctcgcccgctgtgagtgccacgtgggctatcagctagcagcggacggcaaggcctgtgaagatgtggacgaatgtgccgcagggctggcccagtgtgcccatggctgcctcaacacccaggggtccttcaagtgcgtgtgtcacgcgggctatgagctgggcgccgatggccggcagtgctaccggattgagatggaaatcgtgaacagctgtgaggccaacaacggcggctgctcccatggctgcagccacaccagtgctgggcccctgtgcacatgtccccgcggctacgagctggacacagatcagaggacctgcatcgatgtcgacgactgtgcagacagcccgtgctgccagcaggtgtgcaccaacaaccctggcgggtacgagtgcggctgctacgccggctaccggctcagtgccgatggctgcggctgtgaggatgtggatgagtgcgcctccagccgtggcggctgcgagcaccactgcaccaacctggccggctccttccagtgctcctgcgaggccggctaccggctgcacgaggaccgtaggggctgcagccccctggaggagccgatggtggacctggacggcgagctgcctttcgtgcggcccctgccccacattgccgtgctccaggacgagctgccgcaactcttccaggatgacgacgtcggggccgatgaggaagaggcagagttgcggggcgaacacacgctcacagagaagtttgtctgcctggatgactcctttggccatgactgcagcttgacctgtgatgactgcaggaacggagggacctgcctcctgggcctggatggctgtgattgccccgagggctggactgggctcatctgcaatgagacttgtcctccggacacctttgggaagaactgcagcttctcctgcagctgtcagaatggtgggacctgcgactctgtcacgggggcctgccgctgccccccgggtgtcagtggaactaactgtgaggatggctgccccaagggctactatggcaagcactgtcgcaagaaatgcaactgtgccaaccggggccggtgccaccgcctctacggggcctgcctctgcgacccagggctctacggccgcttctgccacctcacctgcccgccgtgggcctttgggccgggctgctcggaggagtgccagtgtgtgcagccccacacgcagtcctgtgacaagagggatggcagctgctcctgcaaggctggcttccggggcgagcgctgtcaggcagagtgtgagctgggctactttgggccggggtgctggcaggcatgcacctgcccagtgggcgtggcctgtgactccgtgagcggcgagtgtgggaagcggtgtcctgctggcttccagggagaggactgtggccaagagtgcccggtggggacgtttggcgtgaactgctcgagctcctgctcctgtgggggggccccctgccacggggtcacggggcagtgccggtgtccaccggggaggactggggaagactgtgaggcagattgtcccgagggccgctgggggctgggctgccaggagatctgcccagcatgccagcacgctgcccgctgcgaccctgagaccggagcctgcctgtgcctccctggcttcgtcggcagccgctgccaggacgtgtgcccagcaggctggtatggtcccagctgccagacaaggtgctcttgtgccaatgatgggcactgccacccagccaccggacactgcagctgtgcccccgggtggaccggctttagctgccagagagcctgtgatactgggcactggggacctgactgcagccacccctgcaactgcagcgctggccacgggagctgtgatgccatcagcggcctgtgtctgtgtgaggctggctacgtgggcccgcggtgcgagcagcagtgtccccagggccactttgggcccggctgtgagcagctgtgccagtgtcagcatggagcagcctgtgaccacgtcagcggggcctgcacctgcccggccggctggaggggcaccttctgcgagcatgcctgcccggccggcttctttggattggactgtcgcagtgcctgcaactgcaccgccggagctgcctgtgatgccgtgaatggctcctgcctctgccccgctggccgccggggcccccgctgtgccgagacctgcccagcccacacctacgggcacaattgcagccaggcctgtgcctgctttaacggggcctcctgtgaccctgtccacgggcagtgccactgtgcccctggctggatggggccctcctgcctgcaggcctgccctgccggcctgtacggcgacaactgtcggcattcctgcctctgccagaacggagggacctgtgaccctgtctcaggccactgtgcgtgcccagagggctgggccggcctggcctgtgagaaggagtgcctcccccgggacgtcagagctggctgccggcacagcggcggttgcctcaacgggggcctgtgtgacccgcacacgggccgctgcctctgcccagccggctggactggggacaagtgtcagagcccctgcctgcggggctggtttggagaggcctgtgcccagcgctgcagctgcccgcctgccgctgcctgccaccacgtcactggggcctgccgctgtccccctggcttcactggctccggctgcgagcaggcctgcccacccggcagctttggggaggactgtgcgcagatgtgccagtgtcccggtgagaacccggcctgccaccctgccaccgggacctgctcatgtgctgctggctaccacggccccagctgccagcaacgatgtccgcccgggcggtatgggccaggctgtgaacagctgtgtgggtgtctcaacgggggctcctgtgatgcggccacgggggcctgccgctgccccactgggttcctcgggacggactgcaacctcacctgtccgcagggccgcttcggccccaactgcacccacgtgtgtgggtgtgggcagggggcggcctgcgaccctgtgaccggcacctgcctctgccccccggggagagccggcgtccgctgtgagcgaggctgcccccagaaccggtttggcgtgggctgcgagcacacctgctcctgcagaaatgggggcctgtgccacgccagcaacggcagctgctcctgtggcctgggctggacggggcggcactgcgagctggcctgtccccctgggcgctacggagccgcctgccatctggagtgctcctgccacaacaacagcacgtgtgagcctgccacgggcacctgccgctgcggccccggcttctatggccaggcctgcgagcacccctgtccccctggcttccacggggctggctgccaggggttgtgctggtgtcaacatggagccccctgcgaccccatcagtggccgatgcctctgccctgccggcttccacggccacttctgtgagagggggtgtgagccaggttcatttggagagggctgccaccagcgctgtgactgtgacgggggggcaccctgtgaccctgtcaccggtctctgcctttgcccaccagggcgctcaggagccacctgtaacctggattgcagaaggggccagtttgggcccagctgcaccctgcactgtgactgcgggggtggggctgactgcgaccctgtcagtgggcagtgtcactgtgtggatggctacatggggcccacgtgccgggaaggtgggcccctccggctccccgagaacccgtccttagcccaggggctcagcgggcacactgcccgcctccagcagacccacatcccggagcggtggaccagcgaggcactagtagaggcagtcccgtggagcccgcctctccagtcccagccagaggggaccctggcctttggtgaccactgagaaggacacttcacgggcccagagctcctggtactgcccttcctttgagggccgtggagggctgtggacagcccagcaacctgtcgctcttggaggctggtgtggccttgaggagggaagcctcgcatggccgctggaagagaggcgcctcctggcctggctctgcagaacccaggggcacgctctgggcctgggctgaggaagtcccgctctccccgcggctctgagttggactgaggacaggtgtgggcgccagtgtgggtgcaggcgcaggtgcaggcacagggccactgtcctccaggcaggctttttggtgctaggccctgggactggaagtcgcccagcccgtatttatgtaaaggtatttatgggccactgcacatgcccgctgcagccctgggatcagctggaagctgcctgtcatctcctgcccaatccccagaaaccctgattcaggtctgcaggctcctgcgggctcaccaggctgctggctccggtaccatgtaaacctaggaaggtaaaggagcaggc

SEQ ID NO: 307 - DNA, 3055 bp, Homo Sapiens
gcgggtggtgccggtggcggcggcgggggagcgcgggacaggaggcttcggggaagatggacccggcgccctcgctgggctgcagcctcaaggatgtgaagtggagctcggtggccgtgccgctcgacctcctggtcagcacttaccggctgccccagatcgcgcgcctggacaacggagagtgcgtagaagggctgcgggaaaatgactatctgctgattcattcctgccgccagtggaccaccatcactgcccacagcttggaggagggtcactatgtcattgggccaaagatagagattccggtacattatgcagggcaattcaagctgctggaacaagaccgagatataaaggagccagtgcaatatttcaacagtgtggaggaggtggctaaggcatttcctgaacgcgtgtacgtcatggaggatatcacattcaacgtgaaggttgcttcaggtgaatgcaatgaagacactgaagtttacaacatcaccctgtgtactggggatgaactcactctaatggggcaggcagaaatcctttatgcaaagacattcaaggaaaagtcacgactcaacacaatcttcaaaaagattgggaagctcaattccatcagcaagctgggaaaaggcaaaatgccgtgcctcatttgtatgaatcaccggaccaacgaaagcattagccttccattccagtgcaagggcagatttagcacccgaagtcccctggaacttcagatgcaagagggcgaacacaccatccgcaacattgtggagaaaaccaggcttcctgtgaatgtgactgtgccaagccctccaccgagaaacccatacgacctccacttcatccgtgaggggcaccgctataagtttgtgaacatccagaccaagacggtggtggtttgctgtgtgctgcggaacaacaagatcctccccatgcactttcctttgcacttgactgtccccaagttcagcctcccagaacacctggtgaagggagagagctggcccgaaaccctggtccatcactggctaggtatctgccaagaacagttcgacatcgatgagtattcacgggctgtccgtgatgtgaaaaccgactggaatgaagaatgcaagagccccaagaagggtcggtgctctggccacaaccacgtgcccaattcgctcagctacgcccgcgatgagctcacccagtccttccaccgactctcggtctgtgtgtatggcaacaatctccatggcaacagtgaggtgaaccttcatggttgcagggacctggggggagattgggctccctttcctcatgacatcctgccctatcaggactctggagatagtgggagcgactaccttttcccagaagctagtgaagaatcagcaggcatcccgggaaagtcagaacttccctacgaagagctgtggctggaggaaggcaagcccagccatcagcctctcactcgctctctgagcgagaagaacagatgtgatcagtttagaggttctgtccgatccaaatgtgcgacttctcctcttcccatccctgggactctgggagcagcagtgaagtcttcagatactgccctacctccacctccagtgcctcccaaatctgaagccgtcagagaagaatgccggctcctgaacgccccacctgttccaccccgaagcgcaaagcctttgtccaccagtccctccatccctcctcgcacagtcaagccagcgcggcaacagactcgctctcccagccccaccttgtcctactattcttcagggctacacaacatcgtcactaaaactgacacaaatccttctgaaagcactcctgtttcctgctatccatgtaaccgagtgaaaactgattctgtggacctgaaatccccgtttggaagtccttctgctgaagctgtgtcctctcggctctcatggcctaaccattattcaggagcatcagaaagccagaccaggagtgacttcctgctggatccaagcaggagttatagttaccctagacaaaagacgccaggcacacccaagagaaactgcccagcaccttttgattttgatggctgtgagctcctggccagccccactagcccagtcactgcagaattcagtagcagcgtctctggttgtcccaagtcagccagctactctctggagagcacagatgtgaaatctcttgcagctggtgtgacaaagcagagtacgtcatgccctgccttaccccccagggctccaaaactagtggaagagaaggtcgcctccgaaacatctcctttgcctctgaaaattgatggtgctgaggaagaccccaagtctgggtcaccagatctctcggaggaccagtattttgttaaaaagggcatgcaggacatcttctctgcctcctaccctttctcatctccgctccatctccagctggcccccagatcctgtggcgacggttccccatggcagccacctgctgacctatcaggactctctatagaggaagtgtccaagtcactacggttcattggtttgtccgaagatgtcatatcattctttgttactgaaaagattgatgggaacctgcttgttcagctaacggaagaaatcctctcagaggatttcaaattgagcaaattgcaggtgaagaagataatgcaattcattaatggctggaggcccaaaatatagccaaataacccccggccagcatggaacaaaactgatcaatgcgtgtgctagaaggggtgggctgggacacaatttcatgtttttgcactaaaaaccttctctgtaaatagggataagagaaactcttactatgcagattacgtttttgaatggtgaacaggctattttgtacatcaataaaaatgctgtacagaacacttggaggtgtgccttgtacgtcactcaacaaacactcagcagctgctaaaagaaaaaaaggcatgtgcagagaaatcattcttacccaagtaggtttatgtgagaaggtatgatatttattacaaaatagccaaagctgaaagacataaaaatctttaaaaaaaaaaaaaaaa

SEQ ID NO: 308 - DNA, 2423 bp, Homo Sapiens
ttccgcctccagcgcgagccccgccgccgccgagcatggacgaccccgactgcgactccacctgggaggaggacgaggaggatgcggaggacgcggaggacgaggactgcgaggacggcgaggccgccggcgcgagggacgcggacgcaggggacgaggacgaggagtcggaggagccgcgggcggcgcggcccagctcgttccagtccagaatgacagggtccagaaactggcgagccacgagggacatgtgtaggtatcggcacaactatccggatctggtggaacgagactgcaatggggacacgccaaacctgagtttctacagaaatgagatccgcttcctgcccaacggctgtttcattgaggacattcttcagaactggacggacaactatgacctccttgaggacaatcactcctacatccagtggctgtttcctctgcgagaaccaggagtgaactggcatgccaagcccctcacgctcagggaggtcgaggtgtttaaaagctcccaggagatccaggagcggcttgtccgggcctacgagctcatgctgggcttctacgggatccggctggaggaccgaggcacgggcacggtgggccgagcacagaactaccagaagcgcttccagaacctgaactggcgcagccacaacaacctccgcatcacacgcatcctcaagtcgctgggtgagctgggcctcgagcacttccaggcgccgctggtccgcttcttcctggaggagacgctggtgcggcgggagctgccgggggtgcggcagagtgccctggactacttcatgttcgccgtgcgctgccgacaccagcgccgccagctggtgcacttcgcctgggagcacttccggccccgctgcaagttcgtctgggggccccaagacaagctgcggaggttcaagcccagctctctgccccatccgctcgagggctccaggaaggtggaggaggaaggaagccccggggaccccgaccacgaggccagcacccagggtcggacctgtgggccagagcatagcaagggtgggggcagggtggacgaggggccccagccacggagcgtggagccccaggatgcgggacccctggagaggagccagggggatgaggcagggggccacggggaagataggccggagcccttaagccccaaagagagcaagaagaggaagctggagctgagccggcgggagcagccgcccacagagccaggccctcagagtgcctcagaggtggagaagatcgctctgaatttggaggggtgtgccctcagccagggcagcctcaggacggggacccaggaagtgggcggtcaggaccctggggaggcagtgcagccctgccgccaacccctgggagccagggtggccgacaaggtgaggaagcggaggaaggtggatgagggtgctggggacagtgctgcggtggccagtggtggtgcccagaccttggcccttgccgggtcccctgccccatcggggcaccccaaggctggacacagtgagaacggggttgaggaggacacagaaggtcgaacggggcccaaagaaggtacccctgggagcccatcggagaccccaggccccagcccagcaggacctgcaggggacgagccagccgagagcccatcggagaccccaggcccccgcccagcaggacctgcaggggacgagccagccgagagcccatcggagaccccaggcccccgcccggcaggacctgcaggggacgagccagccgagagcccatcggagaccccaggccccagcccggcaggacctacaagggatgagccagccgagagcccatcggagaccccaggcccccgcccggcaggacctgcaggggacgagccagccgagagcccatcggagaccccaggcccccgcccggcaggacctgcaggggacgagccagccgagagcccatcggagaccccaggccccagcccggcaggacctacaagggatgagccagccaaggcgggggaggcagcagagttgcaggacgcagaggtggagtcttctgccaagtctgggaagccttaaggaaaggagtgcccgtcggcgtcttggtcctcctgtccctgctgcaggggctggggcctccggagctgctgcgggctcccctcaggctctgcttcgtgacccgtgacccatgacccacagtgctggcctcctgtggggccactatagcagccaccagaagccgcgaggccctcagggaagcccaaggcctgcagaagcctcctggcctggctgtgtcttccccacccagctctcccctgcgcccctgtctttgtaaattgacccttctggagtggggggcggcgggcagggctgcttttcttagtctgataccaagcaaggccttttctgaataaattcatttgactttgaaaa

SEQ ID NO: 309 - DNA, 2402 bp, Homo Sapiens
ggcggtcggagatccgagagctctgcttctctgaaaagcgtgtggctttctggacttgtttcaggccacccacgagccagcgggaaaggattgccagccagagaaagacgaactccgaagtcccaatgcacagatcagcccccagtcaaaccaccaagaggagccgatcgccattttccactactcgtcgtagttgggacgacagcgagagttcgggaaccaacctgaatattgataatgaggactattccaggtatccgccaagagagtacagagcttcgggtagcagaagaggaatggcctatggacatattgactcttatggggcagatgatagtgaggaggagggggctgggcctgttgagcgaccgccagtgagagggaaaactggcaagtttaaagatgataagctgtatgacccagagaaaggggcaaggtctttggctgggccacctccacatttctctagttttagccgtgatgtgagagaggagcgagacaagttagacccagtccctgcagcaagatgctcagctagcagagctgacttcctgccacaaagtagtgtggcctcacagtcgtcttctgaaggcaagctggctacaaaaggtgacagctcggagagggagagaagggagcaaaatttacctgcacgtcccagcagggctcctgtgagtatttgtggtggtggggaaaacacctcaaagagtgcagaggaacctgtggtcaggcccaaaatcagaaacctggcaagtccaaactgcgtgaaaccaaaaattttttttgatactgatgatgatgacgatatgccacacagtacttccaggtggagggataccgccaatgacaatgagggccactcggatggcctggcaagaagagggagaggcgagagttcaagtggctatcccgagccaaagtaccctgaagacaaacgggaagcgaggagtgaccaagtgaaaccagaaaaggtgccgagacgacgacgcaccatggccgaccctgacttctggacgcacagtgatgattactacaaatactgcgacgaagactctgacagtgacaaagagtggattgctgctctgcgtcggaaatatcgaagccgagagcaaaccctgtcctccagtggcgaaagctgggagactctgccggggaaagaagagcgggaacctccacaggctaaggtgagtgccagcactggcaccagccctggccccggtgctagtgccagtgccggggctggcgccggggccagtgctggcagcaatggcagcaattaccttgaagaagttcgagaaccatctcttcaggaagagcaggcatccctggaagaaggagaaattccttggctccagtaccatgagaatgacagtagcagtgagggggataatgattctggtcacgagttgatgcaacctggggtattcatgctggatggaaacaacaaccttgaagatgactccagtgtgagcgaagacctagaagtggattggagcctctttgatggatttgcagatgggttaggagtggctgaagccatttcctatgtggaccctcagttcctcacctacatggcacttgaagaacgcctggcccaggcaatggaaactgcccttgcgcacttggagtctctcgcagtggatgtagaggtggccaatccaccagcaagcaaggagagcattgacgctcttcccgagatcctggtcactgaagatcatggcgcagttggtcaggagatgtgctgccccatctgctgtagcgaatatgtgaagggggaggtggcaactgagctgccgtgccaccactatttccacaagccgtgtgtgtccatctggcttcagaagtcaggcacctgccccgtgtgccgctgcatgttccctcccccactctaaagaccaaggccgtttactcctggtctgattattttccccatctgaaatccacaatactgcaggagccctcttgaaattaacaatggaaataaaaccaatcagtcagttagcctaaacctattgattcctcgtgattatttccaatgtgaaaacagttgtgtatgattgcattaaaaatcatatcatcttttagaggttagaaaagggaaaactaaactttctaaatgctacttgagattgcagtaagaagatacgttttctaacctgaaagttaaatcgcatttgttttcttcagtagaatgggaatgtgttgctgttacttgtaatgtcaagtttatctgttaaatatgtccaaaaggcaaaatcatttttgttgcatgttatgggtcgatgttcctgtaattgcagtgccgtaaaagcttattaaagttgttcttttggttttaaaaaaaaaaaaaaaaaaaaaaaaaaaaaaaaaaaaaaaaaaaaaaaaaaaaaaaaaaaaaaaaa

SEQ ID NO: 310 - DNA, 2955 bp, Homo Sapiens
gcgacggaggtaggcttacgaggcctgtgtcgggtagaaagggtccttcctggaccgggaccctctgccacgaccatggaccgtaggaaaaagcctttggacgtcacggcctcctcgttggtagatcttaaggctgaactcttccgaaagcaagaagaattcaaacaagaaaaacttctaaaagattctggagtttttggaaaaccaaaaacaactaacaagaaaccaagtatctggagcaaacagaatgtaggcgtttcaaatcgagctgagaaggatgctgaacagaagattgaagaacagaagactttagacaaagcaagggaaaaattggaagaaaaagccaaattatatgaaaaaatgactaaaggagactttatagatgaagaagtagaggatatgtaccttgtggatttcacacagaagatcatagacaagcgcaaagaaatggaggcatctggtgcccatagagattctcaaaaggcaggagaaagggacgacgatgaggaaaaccttcctgagggagagatccctcctccccaagaccccagtgaagaatgggtggattacgtggactctttggggcgttcccggcgctgtatgagaaaggatttgccagatctgctggagatggataaaaatcttcaggggagactttttattagtcctgctaatgaaaaaaccctattatctgaagatatgagaaaagaacttcagcgccagcaatgggaggaagaagaaagagaggccctgaagaggcccatggggcccgtacattatgaagacattcgggaaaatgaggcccggcaacttggtgttgggtattttgcctttgcccgagacaaagagttgagaaacaagcagatgaaaaccttagagatgctgcgtgaacagacaacagatcagagaacaaaacgagaaaacataaaggaaaagcgaaaggctatcttagaggcaagacttgccaaacttcgacaaaaaaagatgaaaaaatcaaaagaaggtggaacagaagaagaaaatagagatggagatgttattgggcctttgccaccggagccagaggctgtgccaaccccacgtcctgctgcccagagtagcaaagtagaagtcattgtccaggagaggaaggacaccaagcctggagtgccacacatccgggagtgggaccgcggaaaagaattttcctttggatactggtcgaagaggcagtcagatctccgggctgagagagatcctgagtttgccccgccgtcagattactttgtgggtcagaagagaactggtttttccagcagccaggcatggagcagacctgggccagcacagagtgacccagggcagtgccctgaccagagccacggacctagccctgaacatacgtcacccactcctgcccccgacaacccaccacaagcccccacagttactttcaaaactctggatgacatgatttcctattacaaacaagtgacatgatctttcaaagcacgctgacttgggtttgtactttgacagtgcctttctctcccagagggagaaataactttaggaactgaattgtacctttgtcctgtcctttccctaggaggcacagacttcgggttggatttgtcagcaaggaggaaagttatggaaactttggccacttggctgttcattttattctaagtgggatagggacatacctacctggatttacatgtgagctgcgatagaatagaagtatttattctgtaaaattagacactgagatgtgcttataaccctgtttcatatctactcccacgacttactcatatttaagggttcttttccattccttttgcaaatccgagcatgcaggtgtctttattccaagggttcagcttccagatcagccgatggaccataggtcacgaggaatttctccctgtcaagcagtggaaaactgcatgggaggcaaaatgctctgttctccaagaggacccggaagtaatcacataggaaatgataaggaagaccaggaggagctcttcgtagtccagaaaggtagaagtgggagttgtttacttaattttactgtcataccatgctattacctacactcctgtgtgcagtgggcattcagtaaatgtgtgttgaaggactgggacgtacgtggaggctgctggacctggtcagagactgatgtgccttagcggcaatggttagagcttttcagtgcatcccacctccctgtcgcccccatgctcggcttcctcacattcaggagcctgacttggatcagacttggggctgcacagtggagcaggtgggttcccgtgtcattagtaataaggagagggttgggggtgggcagggctccagaaagtcagcagtgtgcctgggcacccaccccatcctctacctgccacacctcagagggttcctacagctgcacacaagcagttgagagttgatgaccaggcccatagggctcccacagctggttcccaggccagtgagtgctgtgagaatacagtagcacaagtccttgttctctgaagagtgggaaggagaggagtgagtgaagtagcctgtcccctgcaggtcctctgcgatggcattgtctcggttcccgcagtgctgcagtgtggaagggagtgccccatcctcattacagatgacacactggagtgtggaggggtcgatgacttgtgcagggtcatatggtacctaaggggcagatctcagacttaaacacaattgatgtctaacccctagacagtctttttagtgccctctgctctcagtcttgttgccctagtatcaagcaatcttagacaaacatcctgaattcttacaaacttacctctaaactctgaggataaagttgccagtccttttaatggtcagcctaatcattctgtcagcctaatcgggtaattgctttttttaataaatacacataaaaaccaaaaaaaaaaaaaaaaa

SEQ ID NO: 311 - DNA, 3114 bp, Homo Sapiens
ggggcccggaagtggtccctgtagaaccactgtggcaccgctactccgtgccgcgcccgtcgagcattgcgttgctgcattgcgccccaccgactccactatgttgaagaaattcgacaagaaggatgaggagtcaggtggaggctccaacccattccagcaccttgagaagagtgcggtactccaggaggcccgtgtatttaatgaaactcccatcaaccctcggaaatgtgcccacatcctcaccaagattctttatctcataaaccagggggagcacctggggaccacggaagcgaccgaggccttctttgccatgaccaagctctttcagtccaatgatcccacactccgtcggatgtgctacttgaccatcaaggagatgtcttgcattgcagaggatgtcatcattgtcaccagcagcctaacaaaagacatgactgggaaagaagacaactaccggggcccggccgtgcgagccctctgccagatcactgatagcaccatgctgcaggctattgagcgctacatgaaacaagccattgtggacaaggtgcccagtgtctccagctctgccctcgtgtcttccttgcacctgctgaagtgcagctttgacgtggtcaagcgctgggtgaatgaggctcaggaggcagcatccagtgataacatcatggtccagtaccacgcactagggctcctgtaccatgtgcgtaagaatgaccgcctagccgtcaataagatgatcagcaaggtcacacggcatggccttaagtctccctttgcctactgcatgatgatccgggtggccagcaagcagctggaagaggaggatggcagccgtgacagcccactgtttgacttcatcgagagctgcttgcgcaacaagcacgagatggtggtgtatgaagccgcctcggccatcgtcaatctgccaggctgcagtgccaaagagctggccccggctgtgtcagtgctccagcttttctgcagctcacccaaggctgctctccgctatgctgctgttcgtaccctcaataaggttgccatgaagcatccgtcagctgtgacagcttgtaatctggatctggagaacctggtcacagattcaaaccgcagcattgccacgctggccatcaccaccctccttaagacgggcagcgagagcagcatcgaccgcctcatgaagcagatctcctccttcatgtcagaaatctcggatgaattcaaggtggtggttgtccaggccatcagtgccctgtgtcagaaatatcctcgcaaacacgccgtccttatgaacttcctgttcaccatgctgcgggaagagggtggctttgagtataagcgcgctatcgtggactgcatcatcagcatcattgaagagaactcagagagcaaggagacagggctgtcacatctgtgcgagttcatcgaggactgcgagttcacagtgctggccacccgtattctacatctcctgggccaggaggggcccaagaccaccaatccctcaaagtacatccgcttcatctataaccgagtggtcttggagcatgaggaggtccgggcaggtgctgtgagtgctctggcgaagtttggagcccagaatgaagagatgttacccagtatcttggtgttgctgaagaggtgtgtgatggatgatgacaatgaagtaagggaccgagccaccttctacctaaatgtcctggagcagaagcagaaggcccttaatgcaggctatatcctaaatggtctgactgtgtccatccctggtctggagagggctctgcagcagtacactctagaaccatcagaaaaaccttttgacctcaagtctgtgcccctggccacggcgcccatggcagagcagagaacagaaagtacccccatcacagcagtcaaacagcctgagaaagtggcagctaccaggcaggagatcttccaggagcagttggcagcagtgccagagttccgcggtcttgggcccctcttcaagtcctcgcctgagcccgtggccctcaccgagtcagagacggagtatgtcatccgctgcaccaaacacaccttcaccaaccacatggtttttcagtttgactgcacaaacacactcaatgaccagaccttggagaatgtcacagtgcagatggagcccactgaggcctatgaggtgctctgttacgtgcctgcccggagcctgccctacaaccagcccgggacctgctacacactggtggcactgcccaaagaagaccccacagctgtggcctgcacattcagctgcatgatgaagttcactgtcaaggactgtgatcccaccactggggagactgatgacgaaggctatgaggatgagtatgtgctggaagatctggaagttactgtagctgatcacattcaaaaggtcatgaaactgaacttcgaagcagcctgggatgaggtaggggatgaatttgagaaggaggaaacgttcaccttgtctaccatcaagacacttgaagaggctgtgggtaatattgtgaagttcttgggaatgcacccttgtgagaggtcagacaaagtgccggataacaagaacacccacacgttgctcctggctggtgtgttccggggtggtcatgacatcctggtgcgctcccggctgctgcttttggacacagtgacaatgcaggtgacagccagaagtttggaggagctgccagtagacatcatcttggcatctgtgggataagaggccagcctgcataggacctcatacccttccccaacactacctggaagttgtgccttcctcatgaaactggcagaaaccccttcccaagcttctgtattgaaaaacaattaggaatcattgcagatttttttttattctgctcccacctcccacccgggactacttgctggtgactttttttttttttttttttaaataggggatgattttagcttgtcctaaatcttgctgtccacccttccaggaaagggacattgtaaatgaataaaacattctcaactcctcttgaatctatcccccaagaaaccatcttatccctgtaataaatcagcatgtatttattgaaaaaaaaaaaaaaaaaaaaaaaaaaaaaaaaaaaaaaaaaa

SEQ ID NO: 312 - DNA, 1466 bp, Homo Sapiens
gctagatatggcgtcctctttgcttgcgggcgagcgattggtgcgtgctttgggccccggcggggagctggagccagagcggctaccccgaaagctgcgggccgagcttgaggccgcgctggggaagaagcacaagggcggtgatagctccagtggcccccaacgcttggtttctttccgtctcatccgggatctgcaccagcatctgagagaaagggattccaaactatacctccatgagctcctagaaggcagtgaaatctatctcccagaggttgtgaagcctccacggaacccagaactagttgcccggctggagaagattaagatacagctggccaatgaggaatataaacggatcacccgcaacgtcacttgtcaggatacaagacatggtgggactctcagcgacctgggaaagcaagtgagatcattgaaggctctggtcatcaccatcttcaatttcattgtcacggtggttgctgccttcgtctgcacttaccttggaagccaatatatcttcacagaaatggcctcgcgggtgctagctgcattgatcgtcgcctctgtggtgggtctggccgagctgtatgtcatggtgcgggcaatggaaggcgagctgggagaactgtaactggtgcttcatcatcaagtctagagaagactttgggggcttcaggctccaattggcagtcaccgactcagtcaacccatcagactttttgtattcagctccagttagtcagaagaccagcccaggccagctgctgtttctgtggggagccctaatcttctgtgaatttccaaagggagcattggaggagattgagataacacatctttaaaacagaaagaactggtcttggtctatcagtacctcttcctgaatctggtacccatctgccttctccagttcattctaaacactgctgggactagggtttttccatcaggagcaaatggaatccaggccttcccagaagtagaccatactgccttgaacttgtccatatgtacaaactaatcaccagctttctccatacatttttaatgcagacctgtaattgagttcagaagcctccaagaaaacagaaaggatcccctttctccagtttgtgctggaagaggagctgatcagagacatcaaataagagaaagatgggttgctagaggatggtagaactggaagcaaggcagctacctttttgcaaaaggaaatggtgttaggccccttttccagaagataagacagactcatagagattaaatgatcactatggtccttcttctgttaaatggagccaaagacgcctatgttgttctgaagtcttgtaatgtttaacttctgagaacttagattagtggtgtgatgatagagtctgtataacgcattgaaaagggtatcaggcttagttatttatccaataaatatttattgtatgcagggtaaaaaaaaaaaaaaaaaa

SEQ ID NO: 313 - DNA, 1327 bp, Homo Sapiens
cagggtcccagatgcacaggaggagaagcaggagctgtcgggaagatcagaagccagtcatggatgaccagcgcgaccttatctccaacaatgagcaactgcccatgctgggccggcgccctggggccccggagagcaagtgcagccgcggagccctgtacacaggcttttccatcctggtgactctgctcctcgctggccaggccaccaccgcctacttcctgtaccagcagcagggccggctggacaaactgacagtcacctcccagaacctgcagctggagaacctgcgcatgaagcttcccaagcctcccaagcctgtgagcaagatgcgcatggccaccccgctgctgatgcaggcgctgcccatgggagccctgccccaggggcccatgcagaatgccaccaagtatggcaacatgacagaggaccatgtgatgcacctgctccagaatgctgaccccctgaaggtgtacccgccactgaaggggagcttcccggagaacctgagacaccttaagaacaccatggagaccatagactggaaggtctttgagagctggatgcaccattggctcctgtttgaaatgagcaggcactccttggagcaaaagcccactgacgctccaccgaaagagtcactggaactggaggacccgtcttctgggctgggtgtgaccaagcaggatctgggcccagtccccatgtgagagcagcagaggcggtcttcaacatcctgccagccccacacagctacagctttcttgctcccttcagcccccagcccctcccccatctcccaccctgtacctcatcccatgagaccctggtgcctggctctttcgtcacccttggacaagacaaaccaagtcggaacagcagataacaatgcagcaaggccctgctgcccaatctccatctgtcaacaggggcgtgaggtcccaggaagtggccaaaagctagacagatccccgttcctgacatcacagcagcctccaacacaaggctccaagacctaggctcatggacgagatgggaaggcacagggagaagggataaccctacacccagaccccaggctggacatgctgactgtcctctcccctccagcctttggccttggcttttctagcctatttacctgcaggctgagccactctcttccctttccccagcatcactccccaaggaagagccaatgttttccacccataatcctttctgccgacccctagttccctctgctcagccaagcttgttatcagctttcagggccatggttcacattagaataaaaggtagtaattagaaaaaaaaaaaaaaaaaa

SEQ ID NO: 314 - DNA, 869 bp, Homo Sapiens
ggccaccggaattaacccttcagggctgggggccgcgctatgccccgccccctccccagccccagacacggaccccgcaggagatgggtgcccccatccgcacactgtcctttggccaccggacatcatgcctcccaagaaggatgttcccgtgaagaaaccagcagggccctccatctccaaacctgctgctaagccagcagcagcaggggctcctccagccaagaccaaagctgagccagctgtcccccaggcccctcagaaaacccaggagcctccagtcgatctctccaaagtggtgatcgagtttaacaaggaccagctggaggagttcaaggaggccttcgagctgtttgaccgagtgggggatggcaagatcctgtacagccagtgtggggacgtgatgagggccctgggccagaaccccaccaacgccgaggtgctcaaggtcctggggaaccccaagagtgatgagctgaagtcgcggcgtgtggactttgagactttcctgcccatgctccaggcagtggccaagaaccgaggccaaggcacatatgaggactacttggaggggtttcgtgtgtttgacaaggaggggaacggcaaagtcatgggagcagagctcagacatgttctcaccacccttggagagaagatgactgaggaggaggtggagaccgttctggcaggacacgaggacagcaacggctgcatcaactacgaggccttcttgaaacacatcctaagcgtctgagtgctgcagatccagtggggtccggacactgggccccgcaggcgaaagcacgttccagccaccaggaggccacctattgtttcaaaataaagactgggttcctctcttggtttca

SEQ ID NO: 315 - DNA, 5817 bp, Homo Sapiens
ggaggcggccacggccgtagtcgctgcctgagagttgttgtttcctcctcctcctcctccgcctccgccgccgttgcttgaatggtggagccgaagctcggctcgtgaacacacactgacagctatagggcaggcggcggcaccgtccccgcttcccctcggcggcggggtgtcccgtcggcggccctgaagtgacccataaacatgtcttgtgagaggaaaggcctctcggagctgcgatcggagctctacttcctcatcgcccggttcctggaagatggaccctgtcagcaggcggctcaggtgctgatccgcgaggtggccgagaaggagctgctgccccggcgcaccgactggaccgggaaggagcatcccaggacctaccagaatctggtgaagtattacagacacttagcacctgatcacttgctgcaaatatgtcatcgactaggacctcttcttgaacaagaaattcctcaaagtgttcctggagtacaaactttattaggagctggaagacagtctttactacgcacaaataaaagctgcaagcatgttgtgtggaaaggatctgctctggctgcgttgcactgtggaagaccacctgagtcaccagttaactatggtagcccacccagcattgcggatactctgttttcaaggaagctgaatgggaaatacagacttgagcgacttgttccaactgcagtgtatcagcacatgaaaatgcataaacgaattcttggacacttgtcatctgtgtactgtgtaacttttgatcgaactggcagacggatatttactggttctgatgactgtcttgtgaaaatatgggcaacagatgatgggaggttgttagctaccttaagaggacatgctgctgaaatatcagacatggctgtaaactatgagaataccatgatagcagctggaagttgtgataaaatgatccgagtctggtgtcttcgaacctgtgcacctttggctgttcttcagggccatagtgcatctattacatcactacagttctcaccattgtgcagtggctcaaagagatatctatcttctactggggcagatggcactatttgtttttggctctgggatgctggaacccttaaaataaacccaagacctgcaaaatttacagagcgccctcggcctggagttcaaatgatctgttcttcttttagtgctggtggaatgtttctggcgacgggaagcacagatcatattattcgggtttatttttttggatcaggtcagccagagaaaatatcagaattggagtttcatactgacaaagttgacagtatccagttttccaacactagtaacaggtttgtaagtggcagtcgtgatgggacagcacgtatttggcaatttaaacgaagagagtggaagagcattttgttggatatggctactcgtccagcaggccaaaaccttcaaggaatagaagataaaatcacaaaaatgaaggttactatggtagcttgggatcgacatgacaatacagttataactgcagttaataacatgactctgaaagtttggaattcttacactggtcaactaattcatgtcctgatgggtcatgaagatgaggtatttgttcttgaaccacacccgttcgatcctagagttctcttttctgctggtcatgatggaaacgtgatagtgtgggatctggcaagaggagtcaaaatacgatcttatttcaatatgattgaaggccaaggacatggcgcagtatttgactgcaaatgctctcctgatggtcagcattttgcatgcacagactctcatggacatcttttaatttttggctttgggtccagtagcaaatatgacaagatagcagatcagatgttctttcatagtgattatcggccacttattcgtgatgccaacaattttgtattagatgaacagactcagcaagcacctcatcttatgcctcccccttttttggttgatgttgatggtaaccctcatccatcaagatatcaaagattagttcctggccgtgaaaattgcagggaggagcaactcatccctcagatgggagtaacttcctcaggactgaatcaagttttaagtcagcaagcaaaccaggagatcagcccactggacagcatgattcaaagactacaacaggagcaagacctgagacgttctggtgaagcaggtatcagtaataccagccgtttaagtagaggctccataagttctacctcagaggttcattcaccaccaaacgtaggactaagacgtagtggacaaattgaaggtgtacggcaaatgcacagcaacgcaccaagaagtgaaatagccacagagcgggatctggtagcttggagtcgaagggtggtagtacccgagctatcagctggtgtagccagtaggcaagaagaatggagaactgcaaagggagaagaagaaataaagacttacaggtcagaagagaaaagaaaacacttaactgttccaaaagagaataaaatacccactgtctcaaagaatcatgctcatgagcatttcctggatcttggagaatccaaaaagcaacagacaaatcaacacaattatcgtacaagatctgcattggaagagactcctagaccctcagaagagatagaaaatggcagtagttcttcagatgaaggcgaagtagttgctgtcagtggtggaacatccgaagaagaagagagagcatggcacagtgatggcagttctagtgactactccagtgattactctgactggacagcagatgcaggaattaatctgcagccaccaaagaaagttcctaagaataaaaccaagaaagcagaaagcagttcagatgaagaagaagaatctgaaaaacagaagcaaaaacagattaaaaaggaaaagaaaaaagtaaatgaagaaaaagatggaccaatatcaccaaagaaaaagaagcccaaagaaagaaaacaaaagagattggctgtgggagaactaactgaaaatggtttgacattagaagaatggttgccatcaacatggattacagataccattccccgaagatgtccatttgtgccacagatgggtgatgaggtttattatttccgacaaggacatgaagcctatgtcgaaatggcccggaaaaataaaatatatagtatcaatcccaaaaaacaaccatggcataaaatggagctacgggaacaagaacttatgaaaatagttggcataaagtatgaagtgggattacctaccctttgctgccttaaacttgcttttctagatcctgatactggtaaactgactggcggatcatttaccatgaaataccatgatatgcctgacgttatagatttcctagtcttgagacaacaatttgatgatgcaaaatacaggcgatggaatataggtgaccgcttcaggtctgtcatagatgatgcctggtggtttggaacaatcgaaagccaggaacctcttcaacttgagtaccctgatagtctgtttcaatgctacaatgtttgctgggacaatggagatacagaaaagatgagtccttgggatatggagcttatacctaataatgctgtatttcctgaagaactaggtaccagtgttcctttaactgatggtgagtgcagatcactaatctataaacctcttgatggagaatggggtaccaatcccagggatgaagaatgtgaaagaattgtggcaggaataaaccagttgatgacactagatattgcctcagcatttgtggcccccgtggatctgcaagcctatcccatgtattgcacagtagtggcatatccaacggatctaagtacaattaaacaaagactggaaaacaggttttacaggcgggtttcttccctaatgtgggaagttcgatatatagagcataatacacgaacatttaatgagcctggaagccctattgtgaaatctgctaaattcgtgactgatcttcttctacattttataaaggatcagacttgttataacataattccactttataattcaatgaagaagaaagttttgtctgattctgaggatgaagagaaagatgctgatgtgccaggaacttctactcgaaaaaggaaggaccatcagcctagaagaagattacgtaatagagcccagtcttacgatattcaagcatggaagaaacagtgtgaagaattgttaaatctcatatttcaatgtgaagattcagagcctttccgtcagccggtagatctccttgaatatccagactacagagacatcattgacactccaatggattttgctaccgttagagaaactttagaggctgggaattatgagtcaccaatggagttatgtaaagatgtcagacttattttcagtaattccaaagcatatacaccaagcaaaagatcaaggatttacagcatgagtttgcgcctgtctgctttctttgaagaacacattagttcagttttatcagattataaatctgctcttcgttttcataaaagaaataccataaccaaaaggaggaagaaaagaaacagaagcagctctgtttccagtagtgctgcatcaagccctgaaaggaaaaaaaggatcttaaaaccccagctaaaatcagaaagctctacctctgcattctctacacctacacgatcaataccgccaagacacaatgctgctcagataaacggtaaaacagaatctagttctgtggttcgaaccagaagcaaccgagtggttgtagatccagttgtcactgagcaaccatctacttcttcagctgcaaagacttttattacaaaagctaatgcatctgcaataccagggaaaacaatactagagaattctgtgaaacattccaaagctttgaatactctttccagtcctggtcaatccagttttagtcatggcactaggaataattctgcaaaagaaaacatggaaaaggaaaagccagtcaaacgtaaaatgaagtcatctgtactcccaaaggcgtccactctttcaaagtcatcagctgtcattgagcaaggagattgtaagaacaacgctcttgtaccaggaaccattcaagtaaatggccatggaggacagccatcaaaacttgtgaagaggggacctggaaggaaacctaaagtagaagttaataccaatagtggtgaaattatacacaagaaaaggggtagaaagcccaaaaagctacagtatgcaaagccagaagatttagagcaaaataatgtgcatcccatcagagatgaagtacttccttcttcaacatgcaattttctttctgaaactaataatgtaaaggaagatttgttacagaaaaagaatcgtggaggtaggaagcccaaaaggaagatgaagacacaaaaattagatgcagatctcctagtccctgcaagtgtcaaagtgttaaggagaagtaaccgaaaaaagatagatgatcctatagatgaggaagaagagtttgaagaactcaaaggctctgaaccccacatgagaactagaaatcaaggtcgaaggacagctttctataatgaggatgactctgaagaggagcaaaggcagctgttgttcgaagacacctctttaacttttggaacttctagtagaggacgagtccgaaagttgactgaaaaagcaaaagctaatttaattggttggtaacttgtaccaaaatattttacttcaaaatctataaagcaggtacagttaaggaataagtagaactaaggcttctgcttccttgctgctgtggtggagtagggaatgttatgatttgatttgcaaaaaaaaaaaaaaaaaaaaaaaaaa

SEQ ID NO: 316 - DNA, 2104 bp, Homo Sapiens
ctctgccgagcctccttaaaactctgccgttaaaatgggggcgggtttttcaactcaaaaagcgctcaatttttttcttttcaaaaaaagctgatgaggtcggaaaaaagggagaagaaaccggcaccctctctgagaggcaacagaagcagcaattgtttcagcgaaaaaagcagcaagggagggagtgaaggaaaaaagcaaaaaagggggcgacacgcaagtgcctgtaggggtgaaaggagcagggaccggcgatctagggggggatcagctacaaaagaaactgtcactgggagcggtgcggccaaggaggaagcagtgctgccaggctctgctccagggcacagctggctggcggctgccctgtccgcagcaaaggggcacaggccggggaccgcgagaggtggcaaagtggcaccgggcgccgaggctgctgagcgctcgccgagacggcgaccggactggctgccccggaactgcggcgactctccctactcagaacttggcctacgtttcccaggactctccccatctccagaggcccccacaaaaccgggaaaggaaggaaaggacagcggcggcagcagctcaatgagtgcctacagcagaaagcctgaacgagctcggtcgtaggcgggaagttcccgggggggctgcccagtgcagccgcaatgctgccgcgagctgccccagcagtccgggctccgtagacgctttccgcatcactctccttcctcgggctgccgggagtcccgggacctggcggggccggcatgacgggcttctcgggggcccgccgcacgcccggcagcctccggagacgcgcgccgagcccggctcccacggcctctgaggctcggcggggctgcggctgcctggcgggcgggctccggagctttcctgagcggcattagcccacggcttggcccggacgcgaccaaaggctcttctggagaagcccagagcactgggcaatcgttacgacctgtaacttgagggccaccgaactgctactcccgttcgcctttggcgatcatcttttaaccctccggagcacgtcagcatccagccaccgcggcgctctcccagcagcggaggacccaggactatcccttcggcgagacggatggaaaccgagccccctggaggacctgcccctgcagttctgcctcacacggctcaagtcaccaccgtgaacaagggaccctaaagaatggccgagccttgggggaacgagttggcgtccgcagctgccaggggggacctagagcaacttactagtttgttgcaaaataatgtaaacgtcaatgcacaaaatggatttggaaggactgcgctgcaggttatgaaacttggaaatcccgagattgccaggagactgctacttagaggtgctaatcccgatttgaaagaccgaactggtttcgctgtcattcatgatgcggccagagcaggtttcctggacactttacagactttgctggagtttcaagctgatgttaacatcgaggataatgaagggaacctgcccttgcacttggctgccaaagaaggccacctccgggtggtggagttcctggtgaagcacacggccagcaatgtggggcatcggaaccataagggggacaccgcctgtgatttggccaggctctatgggaggaatgaggttgttagcctgatgcaggcaaacggggctgggggagccacaaatcttcaataaacgtggggagggctcccccacgttgcctctactttatcaattaactgagtagctctcctgacttttaatgtcatttgttaaaatacagttctgtcatatgttaagcagctaaattttctgaaactgcataagtgaaaatcttacaacaggcttatgaatatatttaagcaacatctttttaacctgcaaaatctgttctaacatgtaattgcagataactttgactttcttctgaatattttatctttccttggcttttcccttgcttccccttttgccaatctcaacacccaagttgaagactttgtttttaaaatggtttgtcctgatgcttttgtctaattaaaacactttcaaaacaggaaaaaaaaaaaaaaaaaa

SEQ ID NO: 317 - DNA, 1191 bp, Homo Sapiens
atggcgtgcgcggggctgctcaccgtgtgcctgctccggccgcccgcgccccagccccagccccagaccccgcggcacccccagctcgcgcccgacccggggcccgccggacacacgctcttccaggacgttttccgcagagcagacaagaatgatgatgggaagctctcatttgaggaattccagaattactttgccgatggggttctcagcctgggggagctgcaggaactgttcagcggcattgatgggcatctcaccgacaatttagaaacagaaaaactgtgtgactacttctcagagcacctgggtgtctaccggccggtgctggctgcattggaatcgctgaaccgtgcagtgctcgctgccatggatgccaccaagctggagtacgagagggcctccaaagtggaccagtttgtgacgcgcttcctgctgcgggagacggtgagccagctgcaagcccttcagagctcgctggagggggcgtcagataccctggaggcccaggcccatggctggcggtcagatgcagagagcgtggaggcgcagagcaggctctgcggcagccggcgggcaggacgccgagccctgaggagtgtcagccggtcatccacctggtcccccggctcttctgacacagggcgcagctcagaggccgagatgcagtggcggctccaggtgaaccgcctccaggagctcatcgaccagctcgagtgcaaggtgagggccgtggggccagggccccacaagggaggaccctcctggtatccaccagagccaggcccatgctggaggcccggcccacactctgtgccctcacaggccccccggctggaacccctgcgtgaagaggacctggccaaggggcctgacttgcacatcctcatggcccagaggcaggtccaggtggcagaggaaggcctgcaggacttccaccgagccctgcgctgctatgtggacttcacaggggcccagagccattgtctgcatgtgtccgcccagaagatgctggacggtgcctccttcaccctgtatgagttctggcaggatgaggcctcctggagaaggcaccagcagtcgcctggcagcaaggccttccagcgcatcctcatcgaccacctgcgggccccggacaccctcaccactgtgttcttcccagcctcctggtggataatgaataacaactga

SEQ ID NO: 318 - DNA, 2682 bp, Homo Sapiens
gccgaggattcggggtagtgtagtcctggcgccccgctggaggagctccccagctggtggctggagcgaccccttgttctttggtggcgctgatctaccttctgagatatcatccttcttcagggagataaggaaaaaaagccacagggtcccggagagccaggggaatgcttcaaaagttctgctgcctgagagtaacgtcacagtaatggaacgggaagattctggaatctgtgtccccacctagacaacgattatactggcaggatctatcaggtgtacctattttggaactctggagtctagttgaaggcctccagttcccagggggaaggaagcatggaggtgtgtcctccatttggaagtagtgctaagaaaattaaaagaataaaactgggcaggggcatgagaataggatgcaaagatgaatttttggactgagtggccaagaagctccatggtgagcactcacagtctaaggctggaagtttaatgaactgttttctacatttcacaggcacacatggcattcagggatgtggctgtggatttcacccaggatgagtggaggctgctgagccctgctcaaaggactctgtacagagaggtgatgctggagaactacagcaacctggtctcactgggaatttcattttctaaaccagaactcatcacccagctggagcaagggaaagagacctggagagaggaaaaaaaatgttcaccggcaacctgtccagatccagagccagagctctacctcgatcctttctgccctccgggtttctccagtcagaaattccccatgcagcatgtgctgtgtaatcatcccccctggatcttcacatgcttgtgtgcagaaggtaacatccagcctggggatccgggcccaggggaccaggagaagcagcaacaagcctctgaggggagaccctggagtgatcaagcagaaggtcctgagggagaaggtgccatgcctttgtttggaagaaccaagaaaaggactctgggagcgttctccaggccaccccagaggcagccagtcagctctcggaacggcctcagaggggtggagttagaagccagcccagctcagacagggaaccctgaggaaacagacaaattgttgaagaggatagaagtcttaggatttggaacagtcaactgtggagagtgtggactgagcttcagcaagatgacaaacctgctcagtcaccagcggatacactcaggggagaagccctacgtgtgtggggtatgtgagaagggcttcagcctaaagaagagcctcgccagacaccagaaggcacactcgggggagaagccaattgtgtgcagggagtgtggacgaggctttaaccggaagtcaacgctaatcatacacgaacggacacactccggtgagaaaccttacatgtgcagtgagtgtgggcgaggcttcagccagaagtcaaacctcatcatacaccagaggacacactcaggggaaaagccttacgtgtgccgggaatgtggcaaaggcttcagccagaagtcagctgtcgtgagacaccagaggacacacttggaggagaagaccatcgtgtgcagtgactgtggcctgggcttcagcgacaggtcaaacctcatctcccaccagaggacgcactctggggagaagccctacgcctgcaaggagtgtgggcgatgcttcaggcagaggaccacccttgtcaaccaccagaggacacactcaaaggagaagccctatgtgtgcggggtgtgtgggcacagcttcagccagaattcaaccctcatctctcacaggcggacacacactggggagaagccgtatgtttgtggggtgtgtgggcgaggctttagtctcaagtcacacctcaacagacaccagaacatacactcaggagagaagcccattgtgtgcaaggactgtggccggggcttcagccagcaatccaacctcatcagacaccagaggacgcactcaggcgagaagcccatggtgtgtggggagtgcgggcgaggcttcagccagaagtcaaaccttgttgcacaccagaggacgcactcaggggagaggccgtatgtgtgccgagagtgcgggcgaggctttagccaccaggccggtctcatcaggcacaagcggaagcactcgagggagaagccctacatgtgcaggcagtgtggactgggctttggcaataagtcagctctaattacacacaagcgggctcactcggaagagaagccttgtgtgtgcagagagtgtggccaaggctttctccaaaagtcacacctcaccttacatcaaatgacacatacgggggagaagccatatgtgtgcaagacgtgtgggcggggcttcagcctcaagtctcacctcagcagacacaggaagaccacgtctgtccaccacagactgccagtgcagcccgaccctgagccgtgtgcagggcaaccttcggattccttatactctctctgaaggcaaagatggggacaaggactaagagtcagaatgttgacactttgatgaaatggagtagagaaatgcattctgtaagtggtcaaaggacatttgactgtttactttctccacactaagtcttctccatgttttgtggccttcggttgtaataaacttggcttctttatacatctgtaaaaaaaaaaaaaaaaaaa

SEQ ID NO: 319 - DNA, 737 bp, Homo Sapiens
ttccggcgttgttgaccctatttcccgtgctgcaccgcagcccctttctcttccggttctaggcgcttcgggagccgcggcttatggtgcagacatggccaagtccaagaaccacaccacacacaaccagtcccgaaaatggcacagaaatggtatcaagaaaccccgatcacaaagatacgaatctcttaagggggtggaccccaagttcctgaggaacatgcgctttgccaagaagcacaacaaaaagggcctaaagaagatgcaggccaacaatgccaaggccatgagtgcacgtgccgaggctatcaaggccctcgtaaagcccaaggaggttaagcccaagatcccaaagggtgtcagccgcaagctcgatcgacttgcctacattgcccaccccaagcttgggaagcgtgctcgtgcccgtattgccaaggggctcaggctgtgccggccaaaggccaaggccaaggccaaggccaaggatcaaaccaaggcccaggctgcagccccagcttcagttccagctcaggctcccaaacgtacccaggcccctacaaaggcttcagagtagatatctctgccaacatgaggacagaaggactggtgcgaccccccacccccgcccctgggctaccatctgcatggggctggggtcctcctgtgctatttgtacaaataaacctgaggcaggaaaaaaaaaaaaaaaaaaaaaaaaaaaaaaaaaaaaaaaaaaa

SEQ ID NO: 320 - DNA, 1753 bp, Homo Sapiens
agacggaagtgcgggcggaggatccccagccgggtcccaagcctgtgcctgagcctgagcctgagcctgagcccgagccgggagccggtcgcgggggctccgggctgtgggaccgctgggcccccagcgatggcgaccctgtggggaggccttcttcggcttggctccttgctcagcctgtcgtgcctggcgctttccgtgctgctgctggcgcagctgtcagacgccgccaagaatttcgaggatgtcagatgtaaatgtatctgccctccctataaagaaaattctgggcatatttataataagaacatatctcagaaagattgtgattgccttcatgttgtggagcccatgcctgtgcgggggcctgatgtagaagcatactgtctacgctgtgaatgcaaatatgaagaaagaagctctgtcacaatcaaggttaccattataatttatctctccattttgggccttctacttctgtacatggtatatcttactctggttgagcccatactgaagaggcgcctctttggacatgcacagttgatacagagtgatgatgatattggggatcaccagccttttgcaaatgcacacgatgtgctagcccgctcccgcagtcgagccaacgtgctgaacaaggtagaatatgcacagcagcgctggaagcttcaagtccaagagcagcgaaagtctgtctttgaccggcatgttgtcctcagctaattgggaattgaattcaaggtgactagaaagaaacaggcagacaactggaaagaactgactgggttttgctgggtttcattttaataccttgttgatttcaccaactgttgctggaagattcaaaactggaagcaaaaacttgcttgatttttttttcttgttaacgtaataatagagacatttttaaaagcacacagctcaaagtcagccaataagtcttttcctatttgtgacttttactaataaaaataaatctgcctgtaaattatcttgaagtcctttacctggaacaagcactctctttttcaccacatagttttaacttgactttcaagataattttcagggtttttgttgttgttgttttttgtttgtttgttttggtgggagaggggagggatgcctgggaagtggttaacaacttttttcaagtcactttactaaacaaacttttgtaaatagaccttaccttctattttcgagtttcatttatattttgcagtgtagccagcctcatcaaagagctgacttactcatttgacttttgcactgactgtattatctgggtatctgctgtgtctgcacttcatggtaaacgggatctaaaatgcctggtggcttttcacaaaaagcagattttcttcatgtactgtgatgtctgatgcaatgcatcctagaacaaactggccatttgctagtttactctaaagactaaacatagtcttggtgtgtgtggtcttactcatcttctagtacctttaaggacaaatcctaaggacttggacacttgcaataaagaaattttattttaaacccaagcctccctggattgataatatatacacatttgtcagcatttccggtcgtggtgagaggcagctgtttgagctccaatgtgtgcagctttgaactagggctggggttgtgggtgcctcttctgaaaggtctaaccattattggataactggcttttttcttcctctgtcctctttggaatgtaacaataaaaataatttttgaaacatcc

SEQ ID NO: 321 - DNA, 1977 bp, Homo Sapiens
gtcctccgcgccttccgtcggtcggtccttccttcctgcttcgcctccgcgcctcgcgctatgggacagagcccccgatccgccagcaccacctgaggatccagaaaccgccccagcgatggaagaggatcaggagctggagaggaaagcaatagaagaactgcttaaggaggcaaaacgtgggaaaactagagctgaaacaatgggacccatgggttggatgaagtgtcctcttgctagcaccaataaaagatttctaattaacacaattaaaaacacattgccctctcataaagagcaagaccatgaacaaaaagagggcgataaggaaccagcgaagagccaggcccagaaagaagaaaacccgaagaaacacagaagccatccttacaagcacagcttccgcgctcgaggttccgccagttactccccgccacgaaagcggagcagccaggacaagtacgaaaagcggtccaaccggcggtgaggctggaaccagggccagccagccctgcgggcctccgtgctccttcggggtgcggtgtgcggagaaggcctgagctggcagggcaaacacctgagagtgactttgacattaggtcctttgttgtttttaaagaggctgctggccacaggcaaaaaaaatgacctagcaactcttgaggaaacaagtgcaaaggaggatgtcttggcaagtttaagctacttctgcagtgtagtagacttacatattgttgtttatcttgtttggaagtgtgtttcaaaataaacatgtctagaatttaaagttttcagagattgttaaaactggttccaattttttggtcatttctcagaaaaataaaatacttataaatcctatattttactttttgggggtattacatttaaaatttagaaatcatcagtccagtgaccatatttatgaaaagctgtagccctccaaggtctgggaatttatcgagaagctctttgatagctctgcatttgttttcccttaggtgaacaatgtaggaaatcctcaaagtggctttgaatttaatgctccacttcagttaccagaggttaaaaatgggttttgttgtttcctgtgcattctcaaactcatttattagatagaacaatctttctatatttaatttttttaatatataggtcttaagtggtgctttaaaaagaaccctcacaagttaaaaattaagagttgtttcagtgctagatcttgccagctaaagacttgtgataccactatatagtatagttgttccagaaatcttcattttaaatagaagtgtttacaatgccttttttcccccagtattggttttcaatacctgttttcatatacaattacaaacctttcaaacctgtattccttctttatactcaggaaaatgtcaccaagcaccctcctccccagttcacaaaaggaagaagatgaagattctgtctccctgttccccctccccagttttccaaagtgtctgagcatatgcctggctgtcctcagatcatcaccatgccacatccctgctccctacttcctggcagccaagaaaagccctttctacatgctagaaggaaatacatccaaaaagttagcattggagtgttagaaactagaatagacctctccgccaccgagctgctgtgtcacgccctcagcctgctagggagtgacaagcccaagtcattcttgatccaccccttctcccaccccagatcccagggactcatcctgtgactttgtaaccacactcattcctttcaaacacagaggaggaattattgcttcatctgactttattcaaatctagttatgtattggcctaaattatttgtgcaaaatttgaaatgttttttatttaaatattagaaatagcacaaagtcatggagtttttaaaaattgttataattaagtaaaaataaagctgaattgtgtcaaaaaaaaaaaaaaaaaaaaaaaaaaaaaaaaa

SEQ ID NO: 322 - DNA, 2448 bp, Homo Sapiens
ggccgagctgcagcccgggctcagtctccgccgccgccgtgaacatggagcccccggacgcaccggcccaggcgcgcggggccccgcggctgctgttgctcgcagtcctgctggcggcgcacccagatgcccaggcggaggtgcgcttgtctgtacccccgctggtggaggtgatgcgaggaaagtctgtcattctggactgcacccctacgggaacccacgaccattatatgctggaatggttccttaccgaccgctcgggagctcgcccccgcctagcctcggctgagatgcagggctctgagctccaggtcacaatgcacgacacccggggccgcagtcccccataccagctggactcccaggggcgcctggtgctggctgaggcccaggtgggcgacgagcgagactacgtgtgcgtggtgagggcaggggcggcaggcactgctgaggccactgcgcggctcaacgtgtttgcaaagccagaggccactgaggtctcccccaacaaagggacactgtctgtgatggaggactctgcccaggagatcgccacctgcaacagccggaacgggaacccggcccccaagatcacgtggtatcgcaacgggcagcgcctggaggtgcccgtagagatgaacccagagggctacatgaccagccgcacggtccgggaggcctcgggcctgctctccctcaccagcaccctctacctgcggctccgcaaggatgaccgagacgccagcttccactgcgccgcccactacagcctgcccgagggccgccacggccgcctggacagccccaccttccacctcaccctgcactatcccacggagcacgtgcagttctgggtgggcagcccgtccaccccagcaggctgggtacgcgagggtgacactgtccagctgctctgccggggggacggcagccccagcccggagtatacgcttttccgccttcaggatgagcaggaggaagtgctgaatgtgaatctcgaggggaacttgaccctggagggagtgacccggggccagagcgggacctatggctgcagagtggaggattacgacgcggcagatgacgtgcagctctccaagacgctggagctgcgcgtggcctatctggaccccctggagctcagcgaggggaaggtgctttccttacctctaaacagcagtgcagtcgtgaactgctccgtgcacggcctgcccacccctgccctacgctggaccaaggactccactcccctgggcgatggccccatgctgtcgctcagttctatcaccttcgattccaatggcacctacgtatgtgaggcctccctgcccacagtcccggtcctcagccgcacccagaacttcacgctgctggtccaaggctcgccagagctaaagacagcggaaatagagcccaaggcagatggcagctggagggaaggagacgaagtcacactcatctgctctgcccgcggccatccagaccccaaactcagctggagccaattggggggcagccccgcagagccaatccccggacggcagggttgggtgagcagctctctgaccctgaaagtgaccagcgccctgagccgcgatggcatctcctgtgaagcctccaacccccacgggaacaagcgccatgtcttccacttcggcaccgtgagcccccagacctcccaggctggagtggccgtcatggccgtggccgtcagcgtgggcctcctgctcctcgtcgttgctgtcttctactgcgtgagacgcaaagggggcccctgctgccgccagcggcgggagaagggggctccgccgccaggggagccagggctgagccactcggggtcggagcaaccagagcagaccggccttctcatgggaggtgcctccggaggagccaggggtggcagcgggggcttcggagacgagtgctgagccaagaacctcctagaggctgtccctggacctggagctgcaggcatcagagaaccagccctgctcacgccatgcccgcccccgccttccctcttccctcttccctctccctgcccagccctcccttccttcctctgccggcaaggcagggacccacagtggctgcctgcctccgggagggaaggagagggagggtgggtgggtgggagggggccttcctccagggaatgtgactctcccaggccccagaatagctcctggacccaagcccaaggcccagcctgggacaaggctccgagggtcggctggccggagctatttttacctcccgcctcccctgctggtccccccacctgacgtcttgctgcagagtctgacactggattcccccccctcaccccgcccctggtcccactcctgcccccgccctacctccgccccaccccatcatctgtggacactggagtctggaataaatgctgtttgtcacatcaacaccaaaaaaaaaaaaaaaaaa

SEQ ID NO: 323 - DNA, 3177 bp, Homo Sapiens
gtttccgctgtcagggccctgcggtgtgactcgcgggctcagctggttggtattttttgggcctcgtgcttcgtggtgggagacccaggtcgaggtccgggtggggccggtgaggggttgggcgtcgggaggtgttggctcgggcctcttcgcgtggccggtgacgccttggctcccccgcaggtccggccgtagcacctccgcgccgtcgccatgtcgcggtttttcaccaccggttcggacagcgagtccgagtcgtccttgtccggggaggagctcgtcaccaaacctgtcggaggcaactatggcaaacagccattgttgctgagcgaggatgaagaagataccaagagagttgtccgcagtgccaaggacaagaggtttgaggagctgaccaaccttatccggaccatccgtaatgccatgaagattcgtgatgtcaccaagtgcctggaagagtttgagctcctgggaaaagcatatgggaaggccaaaagcattgtggacaaagaaggtgtcccccggttctatatccgcatcctggctgacctagaggactatcttaatgagctttgggaagataaggaagggaagaagaagatgaacaagaacaatgccaaggctctgagcaccttgcgtcagaagatccgaaaatacaaccgtgatttcgagtcccatatcacaagctacaagcagaaccccgagcagtctgcggatgaagatgctgagaaaaatgaggaggattcagaaggctcttcagatgaggatgaggatgaggacggagtcagtgctgcaactttcttgaagaagaaatcagaagctccttctggggagagtcgcaagttcctcaaaaagatggatgatgaagatgaggactcagaagattccgaagatgatgaagactgggacacaggttccacatcttccgattccgactcagaggaggaagaagggaaacaaaccgcgctggcctcaagatttcttaaaaaggcacccaccacagatgaggacaagaaggcagccgagaagaaacgggaggacaaagctaagaagaagcacgacaggaaatccaagcgcctggatgaggaggaggaggaggacaatgaaggcggggagtgggaaagggtccggggcggagtgccgttggttaaggagaagccaaaaatgtttgccaagggaactgagatcacccatgctgttgttatcaagaaactgaatgagatcctacaggcacgaggcaagaagggaactgatcgtgctgcccagattgagctgctgcaactgctggttcagattgcagcggaaaacaacctgggagagggcgtcattgtcaagatcaagttcaatatcatcgcctctctctatgactacaaccccaacctggcaacctacatgaagccagagatgtgggggaagtgcctggactgcatcaatgagctgatggatatcctgtttgcaaatcccaacatttttgttggagagaatattctggaagagagtgagaacctgcacaacgctgaccagccactgcgtgtccgtggctgcatcctaactctggtggaacgaatggatgaagaatttaccaaaataatgcaaaatactgaccctcactcccaagagtacgtggagcacttgaaggatgaggcccaggtgtgtgccatcatcgagcgtgtgcagcgctacctggaggagaagggcactaccgaggaggtctgccgcatctacctgctgcgcatcctgcacacctactacaagtttgattacaaggcccatcagcgacagctgaccccgcctgagggctcctcaaagtctgagcaagaccaggcagaaaatgagggcgaggactcggctgtgttgatggagagactgtgcaagtacatctacgccaaggaccgcacagaccggatccgcacatgtgccatcctctgccacatctaccaccatgctctgcactcgcgctggtaccaggcccgcgacctcatgctcatgagccacttgcaggacaacattcagcatgcagacccgccagtgcagatcctttacaaccgcaccatggtgcagctgggcatctgtgccttccgccaaggcctgaccaaggacgcacacaacgccctgctggacatccagtcgagtggccgagccaaggagcttctgggccagggcctgctgctgcgcagcctgcaggagcgcaaccaggagcaggagaaggtggagcggcgccgtcaggtccccttccacctgcacatcaacctggagctgctggagtgtgtctacctggtgtctgccatgctcctggagatcccctacatggccgcccatgagagcgatgcccgccgacgcatgatcagcaagcagttccaccaccagctgcgcgtgggcgagcgacagcccctgctgggtccccctgagtccatgcgggaacatgtggtcgctgcctccaaggccatgaagatgggtgactggaagacctgtcacagttttatcatcaatgagaagatgaatgggaaagtgtgggaccttttccccgaggctgacaaagtccgcaccatgctggttaggaagatccaggaagagtcactgaggacctacctcttcacctacagcagtgtctatgactccatcagcatggagacgctgtcagacatgtttgagctggatctgcccactgtgcactccatcatcagcaaaatgatcattaatgaggagctgatggcctccctggaccagccaacacagacagtggtgatgcaccgcactgagcccactgcccagcagaacctggctctgcagctggccgagaagctgggcagcctggtggagaacaacgaacgggtgtttgaccacaagcagggcacctacgggggctacttccgagaccagaaggacggctaccgcaaaaacgagggctacatgcgccgcggtggctaccgccagcagcagtctcagacggcctactgagctctccactctgtttcccgcctgggccatccaaccttgaagtcctaaaccacacctcagtcactaaaggtctgtttaaagttgttctggttgattgcttgttgccacaaaggtgtgttgagcccattcatttgctgattatatttctgagctgctaccacatgacagacacaaggctcagatgaagaggtgaattgaacacgttcctgacctcaaaga

SEQ ID NO: 324 - DNA, 4489 bp, Homo Sapiens
agcttcgccagctgagcaaggcgaaagccaaggcgcagagggccgggcagcggcgcgaagaggccgcgctgtgccaccagctgggggagctcctggccggccatggccgctacgccgaggctctggagcagcactggcaggagctgcagcttcgggagcgcgctgacgaccctctgggctgtgccgtggcccaccgcaagatcggagagcgcctggccgagatggaggactacccggctgccttgcagcaccagcaccagtacctggagctggcacattccctgcgcaaccacacggagctgcagagggcctgggccaccatcggccgcacccacctggacatctatgaccactgccagtcgagggatgctttgctgcaggcacaggctgcctttgagaagagcttggctattgtggatgaggagctggaggggacactggcccagggagagctgaatgagatgaggacccgcctctatctcaacctgggcctcacctttgagagcctgcagcagacagccctgtgcaacgattacttcaggaagagcatcttccttgcggagcagaaccacctttacgaggacctattccgcgcccgctacaacctgggcaccatccactggcgcgcgggccagcactcccaggctatgcgctgcttggagggtgcccgggagtgtgcgcacaccatgaggaagcggttcatggagagcgagtgctgcgtggttattgcacaggtcctccaagacctgggagactttttggctgccaagcgagccctgaagaaggcctacaggctgggctcccagaagcctgtgcagagggcagccatctgtcagaacctccagcatgtgctggcagtggtccggctgcagcaacagctggaagaggctgagggcagagaccctcagggtgccatggtcatctgtgagcagctaggggacctcttctccaaggcaggagactttcccagggcagctgaggcttaccagaagcagctgcgttttgctgagctgctggacagaccgggtgctgagcgggccatcatccacgtgtccctggccaccacactgggagacatgaaggaccaccatggggccgtgcgccactatgaggaggaactgaggctgcgcagcggcaacgtgctggaggaggccaagacctggctgaacattgcactgtcccgcgaggaggccggcgatgcctacgagctgctggccccgtgcttccagaaagcgctcagctgtgcccagcaggcccagcgtccccagctgcagaggcaggtcttgcagcatctccataccgtgcagctgaggctgcagccccaggaggcccctgagaccgaaaccagactgcgggagctcagtgtagctgaagatgaagatgaggaggaggaggcggaggaggcggcagccacagcggagagcgaagccctggaggccggcgaggtggagctctcagagggcgaggacgacaccgatggcctgaccccgcagctggaggaggacgaggagcttcagggccacctgggccggcggaaggggagcaagtggaaccggcgaaacgacatgggggagaccctgctgcaccgagcctgcatcgagggccagctgcgccgcgtccaggaccttgtgaggcagggccacccccttaaccctcgggactactgtggctggacacctctgcacgaggcctgcaactacgggcatctagaaattgtccgcttcctgctggaccacggggccgcagtggacgacccaggtggccagggctgcgaaggcatcacccccctccacgatgccctcaactgtggccacttcgaggtggctgagctgctgcttgaacggggggcgtccgtcaccctccgcactcgaaagggcctcagcccgctggagacgctgcagcagtgggtgaagctgtaccgcagggacctggacctggagacgcggcagaaggccagggccatggagatgctgctccaggcggctgcctcgggccaagatccccacagctcccaggccttccacaccccaagcagccttctgtttgaccccgagacctctcctcctttgagcccctgcccagaacccccctctaatagcactagactcccagaggcctctcaggcccatgtcagggtctccccagggcaggcggcaccagccatggccaggcctcggaggagcaggcatgggccagccagcagcagcagcagctcagaaggcgaggacagcgcaggccccgcacggccgtcccagaagaggcctcggtgctcggccacagcacaacgggtggcagcctggacgcctggccccgccagcaacagggaagcagccacagccagcaccagccgggcagcctaccaggcagccatccggggtgtgggcagtgctcagagccggctggggcctggcccaccgcggggccacagcaaagcccttgccccccaggcagcgctcatcccggaggaggagtgcctggccggggactggctggagctggacatgcccctgacccgcagccgccggccccgcccccggggcactggagacaaccgcaggcccagtagtacctctgggtcggacagtgaggagagcaggccccgtgcccgagccaagcaggtccgcctgacctgcatgcagagttgcagtgcgccagttaacgcagggcccagcagcctggcttcagaacctccagggagccccagcacccccagggtctcagagcccagtggggacagctctgcggcaggccagcccttgggtccggccccgccccctcccatccgggttcgagttcaagttcaggatcatctcttcctcatccctgtcccacacagcagtgacacccactctgtggcctggctggccgagcaggcggcccagcgctactaccagacctgcgggctgctgcccaggctcaccctacggaaagagggggccctgctggccccacaggacctcatccctgatgtgctgcagagcaatgacgaggtgttggctgaggtgacttcgtgggacctgcccccgttgactgaccgctaccgcagggcctgccagagcctggggcaaggggagcaccaacaggtgctgcaggccgtggagctccagggcttgggcctctcgttcagcgcctgctccctggccctggaccaggcccagcttacacccctgctgcgggccctcaagctgcacacagcactccgggagctgcgcctggcagggaaccggctgggggacaagtgtgtggctgagctggtggctgccctgggcaccatgcccagcctggccctccttgacctctcctccaatcacctgggtcccgaaggcctgcgccagcttgccatggggctcccaggccaagccaccttgcagagtttggaggagctggacttaagcatgaaccccctgggggacggctgtggccagtccctggcctccctcctgcacgcctgccccttactcagcaccctgcgcctgcaggcgtgtggcttcggccccagcttctttctgagccaccagacagcactgggtagtgctttccaagatgctgagcacctgaagaccctgtccctgtcctacaacgccctgggagcccctgccctggccaggaccctgcagagcctgcccgccggcaccctcctgcacttagagctcagctccgtggcagccggcaagggtgattcggacctcatggagcctgtattccgatacctggccaaggaaggctgtgctctagcccacctgaccctgtctgcaaaccacctgggggacaaggctgttagagacctgtgcagatgtctctctctgtgcccctcactcatctcactggatctgtctgccaaccctgagatcagctgtgccagcttggaagagctcctgtccaccctccaaaagcggccccaaggccttagcttccttggcctgtcaggctgcgccgtccagggtcccctgggcctgggcctgtgggacaagatagccgcgcagctccgggaactgcagctgtgcagcagacgcctctgcgctgaggacagggacgccctgcgccagctgcagcccagtcggccgggccccggcgagtgcacgctggaccacggctccaagctcttctttcggcgcctctgaccctggcgctgcctttccccaccctcaccgaagcccctaataaatgaagctgctggccgggcgcggtggctcacgcctgtaatcccaacactttgggaggcccaggcgggcggatcacgaggtcaggagatcgagaccatcctggctaacatggtgaaaccccgtctctactaaaaataccaaaaattagccgggcgtggtggtggaagcctgtagtcccagctactccggaggctgaggcaggagaatggcgtgaacccgggaggcggagcttgcagtgagccgagatcgcaccactgcactccagcctgggcgacagaccgagactccgtctcaaaaaaaaaaaaaaaaaaaaaaaaaaaaaaaaa

SEQ ID NO: 325 - DNA, 701 bp, Homo Sapiens
cggacaatggggacccgggacgacgagtacgactacctattcaaagtggtgctcatcggggactcaggcgtgggcaagagcaacctgctgtcgcgcttcacccgcaacgagttcaacctggagagcaagagcaccatcggcgtggagttcgccacccgcagcatccaggtggacggcaagaccatcaaggcgcagatctgggacaccgctggccaggagcgctaccgccgcatcacctccgcgtactaccgtggtgcagtgggcgccctgctggtgtacgacatcgccaagcacctgacctatgagaacgtggagcgctggctgaaggagctgcgggaccacgcagacagcaacatcgtcatcatgctggtgggcaacaagagtgacctgcgccacctgcgggctgtgccaactgacgaggcccgcgccttcgcagaaaagaacaacttgtccttcatcgagacctcagccttggattccactaacgtagaggaagcattcaagaacatcctcacagagatctaccgcatcgtgtcacagaaacagatcgcagaccgcgctgcccacgacgagtccccggggaacaacgtggtggacatcagcgtgccgcccaccacggacggacagaagcccaacaagctgcagtgctgccagaacctgtgacccctgcgtcctccacccagcgtgcgtgcacgtcctcc

SEQ ID NO: 326 - DNA, 1253 bp, Homo Sapiens
ggggggagggtgtttatcgcggctagagagatgtcgctgctgcggtcgctgcgcgtgtttctggtcgcgcggaccgggagctacccggctgggtctcttctgcgtcagtcgccccagccaaggcacacattttatgctgggccccgtctgtctgcctcggcctccagcaaggagctcctcatgaagctgcggcggaaaacaggctactcctttgtaaattgcaagaaagctctggagacttgtggcggggacctcaaacaggcagagatctggctccacaaggaggcccagaaggagggctggagcaaagctgccaagctccaagggaggaagaccaaagaaggcctgattgggctgttgcaggaaggaaacacaactgtattagtagaggtaaactgtgagacagattttgtttctagaaatttaaaatttcaactgttggtccagcaagtagcccttggaaccatgatgcattgtcagaccctaaaggatcaaccctctgcatacagtaaagtgcagtggctcacgcctgtaaacctagcactttgggaggctgaagcaggtggatcacttgagggtttcttgaattcctctgagctttctggacttccagctgggcctgacagagaaggctcactcaaggatcagttggctttagcaattggaaaactgggagaaaacatgattcttaaacgagctgcatgggtgaaggtgccatctgggttctacgttggctcttatgtccacggagcaatgcagagtccctcacttcacaagctggtgctggggaagtatggggccctggtcatctgtgagacgtctgaacagaaaacaaaccttgaagacgttggccgccgccttgggcagcatgtggtgggcatggcccccctctctgttggctccctggacgatgagcctgggggagaggcagagactaagatgctgtcccagccgtatttgctggatccctccattaccttggggcagtatgtgcagcctcagggggtgtcggtagtagactttgtgcggtttgaatgtggagaaggtgaagaggcagcagaaactgaataggttccagagacttttggcccaggaggaatatttacttttagctctggacatcattacaaaaaggaatatttcccaaacctcttcagaccgagaatgcatgggtaaaattattaaatagttgtataataaaaataattttttccttgtttgcacaaaaaaaaaaaaaaaaaaaaaaaaaaaaa

SEQ ID NO: 327 - DNA, 2272 bp, Homo Sapiens
aggcgcccgcccgccgcgcgtgattctcgcctcgccgcagcccagccctgcgcgccttgcccggcggcccccgcccggccgctccgggcccctggccccgcggagcgatgctgctgctggctgccgccttcctcgtggccttcgtgctgctgctgtacatggtgtctccgctcatcagccccaagcccctcgccctgcccggggcgcatgtggtggttacaggaggttccagtggcatcgggaagtgcattgctatcgagtgctataaacaaggagcttttataactctggttgcacgaaatgaggataagctgctgcaggcaaagaaagaaattgaaatgcactctattaatgacaaacaggtggtgctttgcatatcagttgatgtatctcaagactataaccaagtagagaatgtcataaaacaagcacaggagaaactgggtccagtggacatgctggtaaattgtgcaggaatggcagtgtcaggaaaatttgaagatcttgaagttagtacctttgaaaggttaatgagcatcaattacctgggcagcgtgtaccccagccgggccgtgatcaccaccatgaaggagcgccgggtgggcaggatcgtgtttgtgtcctcccaggcaggacagttgggattattcggtttcacagcctactctgcatccaagtttgccataaggggattggcagaagctttgcagatggaggtgaagccatataatgtctacatcacagttgcttacccaccagacacagacacacctggctttgccgaagaaaacagaacaaagcctttggagactcgacttatttcagagaccacatctgtgtgcaaaccagaacaggtggccaaacaaattgttaaagatgccatacaaggaaatttcaacagttcccttggctcagatgggtacatgctctcggccctgacctgtgggatggctccagtaacttctattactgaggggctccagcaggtggtcaccatgggccttttccgcactattgctttgttttaccttggaagttttgacagcatagttcgtcgctgcatgatgcagagagaaaaatctgaaaatgcagacaaaactgcctaatcttcttaccccttggaagaagactgtttccaaataatttgaacagcttgctgctaaatgggacccaatttttggcctatagacacttatgtattgttttcgaatacgtcagattggaccagtgctcttcaggaatgtggctgcaagcaaggggctagaagttcacctcctgacagtattattaatactatgcaaatatggaataggagaccatttgattttctaggctttgtggtagagaggtgaaggtatgagaattaatagcgtgtgaacaaagtaaagaacaggattccagaatgatcattaaatttgtttctatttattcttttttgcccccctagagattaagtccagaaatgtactttctggcacataaagaaatcttgaggactttgtttaaaccttccataaaaaaacaattttcggtttctcgggttctctctctctgtctctctgtctctctgtctctctgtctctctgtctctctctctctctctctttctttctttgtgtattttattcaagatgagttggacccattgccagtgagtctgaatgtcactgacagccctgtgttgtgctcaggactcactctgctgctggtggaaactcatggcttctctctctctttgatcccataaagctacgagggggacgggagagggcagtgcaatgggaagtaaagagatattttccagtaggaaaagcaatgctttcttgtctttagactcaaatgcttagggaacgtttcatttctcattcatggggaaaggcagcctccttaaatgttttctgaagagcggtaaaatctagaagcttaagaatttacagttccttcaataaccatgatgacctgaagttcacctatcccattttagcatctacttgtttttcccatctcttcctttccaattttgcttatactgctgtaatatttttgtaaaaaaaaaaaaaaaggaaaaaaaagaccagctaaaattttcgacttgactttttaacttaactcatgaattaattaaagcaaatgaaaaaattaaaaagtgtgactttttctcggagcatatatgtagcttttaggaaaggctgatgatggtataaagtttgctcattaagaaaaaaagacaaggctgattttgaagagagttgcttttgaaataaaatgatca

SEQ ID NO: 328 - DNA, 3409 bp, Homo Sapiens
gtcatctggccagcccccgcccctcctcccggcgtcagcccgccagaggccgcgcggggcccgggcttcggccgatcagcccgggaggccccgccgcgcccccttggcccgcgcgcccgtggtcacagtggaagaggcgcccgcgctgcgctgcccggaggagccgtcgcgcgcccgcttcctgttcggctggttcctgccagctcgaggacaaaacacgcgtgcgcgcggcgggcgagcgcgctcgccgcctcagtcgccagcgccgggcgcagtccgcctttttccggagcagactggccgcggtgctagtcggtagcagcggccgccgcagcggctccgcactggcgaaccgagggcagaaaaaggcggggttgacggctttttggtaggagtgggctggaccggacgccagagacaaaggctcccaaggcaagagggactgtggccctgcgtcggctctgctcggaactgctgaccccaggaatttacgccccttcgtttttctcttctgattcttctcttctcccaagcccgcgtcccctcacgcgtggcctctctccttgccgggagggccgcgatggaggtcccgcccaggctttcccatgtgccgccgccattgttcccctccgctcccgctactttagcctcccgcagcctctcccattggcggccgcggccgccgcggcagctagccccgctcctcccttcgctcgctcccagctccgcccggcagggggcgcgccgggcccagcgccacgtcaccgcccagcagccctcccgattggcgggcggggcggctataaagggagggcgcaggcggcgcccggatctcttccgccgccattttaaatccagctccatacaacgctccgccgccgctgctgccgcgacccggactgcgcgccagcacccccctgccgacagctccgtcactatggaggatatgaacgagtacagcaatatagaggaattcgcagagggatccaagatcaacgcgagcaagaatcagcaggatgacggtaaaatgtttattggaggcttgagctgggatacaagcaaaaaagatctgacagagtacttgtctcgatttggggaagttgtagactgcacaattaaaacagatccagtcactgggagatcaagaggatttggatttgtgcttttcaaagatgctgctagtgttgataaggttttggaactgaaagaacacaaactggatggcaaattgatagatcccaaaagggccaaagctttaaaagggaaagaacctcccaaaaaggtttttgtgggtggattgagcccggatacttctgaagaacaaattaaagaatattttggagcctttggagagattgaaaatattgaacttcccatggatacaaaaacaaatgaaagaagaggattttgttttatcacatatactgatgaagagccagtaaaaaaattgttagaaagcagataccatcaaattggttctgggaagtgtgaaatcaaagttgcacaacccaaagaggtatataggcagcaacagcaacaacaaaaaggtggaagaggtgctgcagctggtggacgaggtggtacgaggggtcgtggccgaggtcagggccaaaactggaaccaaggatttaataactattatgatcaaggatatggaaattacaatagtgcctatggtggtgatcaaaactatagtggctatggcggatatgattatactgggtataactatgggaactatggatatggacagggatatgcagactacagtggccaacagagcacttatggcaaggcatctcgagggggtggcaatcaccaaaacaattaccagccatactaaaggagaacattggagaaaacaggaggagatgttaaagtaacccatcttgcaggacgacattgaagattggtcttctgttgatctaagatgattattttgtaaaagactttctagtgtacaagacaccattgtgtccaactgtatatagctgccaattagttttctttgtttttactttgtcctttgctatctgtgttatgactcaatgtggatttgtttatacacattttatttgtatcatttcatgttaaacctcaaataaatgcttccttatgtgattgcttttctgcgtcaggtactacatagctctgtaaaaaatgtaatttaaaataagcaataattaaggcacagttgattttgtagagtattggtccatacagagaaactgtggtcctttataaatagccagccagcgtcaccctcttctccaatttgtaggtgtattttatgctcttaaggcttcatcttctccctgtaactgagatttctaccacacctttgaacaatgttctttcccttctggttatctgaagactgtcctgaaaggaagacataagtgttgtgattagtagaagctttgtaatcataacacaatgagtaattcttgtataaaagttcagatacaaaaggagcactgtaaaactggtaggagctatggtttaagagcattggaagtagttacaactcaaggattttggtagaaaggtatgagtttggtcgaaaaattaaaatagtggcaaaataagatttagttgtgttttctcagagccgccacaagattgaacaaaatgttttctgtttgggcatcctgaggaagttgtattagctgttaatgctctgtgagtttagagaaaagtcttgatagtaaatctagtttttgacacagtgcatgaactaagtagttaaatatttacatattcagaaaggaatagtggaaaaggtatcttggttatgacaaagtcattacaaatgtgactaagtcattacaaatgtgactgagtcattacagtggaccctctgggtgcattgaaaagaatccgttttatatccaggtttcagaggacctggaataataataagctttggattttgcattcagtgtagttggattttgggaccttggcctcagtgttatttactgggattggcatacgtgttcacaggcagagtagttgatctcacacaacgggtgatctcacaaaactggtaagtttcttatgctcatgagccctccctttttttttttaatttggtgcctgcaactttcttaacaatgattctacttcctgggctatcacattataatgctcttggcctcttttttgctgctgttttgctattcttaaacttaggccaagtaccaatgttggctgttagaagggattctgttcattcaacatgcaactttagggaatggaagtaagttcatttttaagttgtgtggtcagtaggtgcggtgtctagggtagtgaatcctgtaagttcaaatttatgattaggtgacgagttgacattgagattgtccttttcccctgatcaaaaaaatgaataaagcctttttaaacg

SEQ ID NO: 329 - DNA, 1857 bp, Homo Sapiens
agttcacccaatggacctgcctactgcagcgtaggcctcgcctcaacggcaggagagcaggcggctgcggttgctgcagccttcagtctccacccggactacgccatgttggggtttgtgggtcgggtggccgctgctccggcctccggggccttgcggagactcaccccttcagcgtcgctgcccccagctcagctcttactgcgggccgctccgacggcggtccatcctgtcagggactatgcggcgcaaacatctccttcgccaaaagcaggcgccgccaccgggcgcatcgtggcggtcattggcgcagtggtggacgtccagtttgatgagggactaccaccaattctaaatgccctggaagtgcaaggcagggagaccagactggttttggaggtggcccagcatttgggtgagagcacagtaaggactattgctatggatggtacagaaggcttggttagaggccagaaagtactggattctggtgcaccaatcaaaattcctgttggtcctgagactttgggcagaatcatgaatgtcattggagaacctattgatgaaagaggtcccatcaaaaccaaacaatttgctcccattcatgctgaggctccagagttcatggaaatgagtgttgagcaggaaattctggtgactggtatcaaggttgtcgatctgctagctccctatgccaagggtggcaaaattgggctttttggtggtgctggagttggcaagactgtactgatcatggagttaatcaacaatgtcgccaaagcccatggtggttactctgtgtttgctggtgttggtgagaggacccgtgaaggcaatgatttataccatgaaatgattgaatctggtgttatcaacttaaaagatgccacctctaaggtagcgctggtatatggtcaaatgaatgaaccacctggtgctcgtgcccgggtagctctgactgggctgactgtggctgaatacttcagagaccaagaaggtcaagatgtactgctatttattgataacatctttcgcttcacccaggctggttcagaggtgtctgcattattgggccgaatcccttctgctgtgggctatcagcctaccctggccactgacatgggtactatgcaggaaagaattaccactaccaagaagggatctatcacctctgtacaggctatctatgtgcctgctgatgacttgactgaccctgcccctgctactacgtttgcccatttggatgctaccactgtactgtcgcgtgccattgctgagctgggcatctatccagctgtggatcctctagactccacctctcgtatcatggatcccaacattgttggcagtgagcattacgatgttgcccgtggggtgcaaaagatcctgcaggactacaaatccctccaggatatcattgccatcctgggtatggatgaactttctgaggaagacaagttgaccgtgtcccgtgcacggaaaatacagcgtttcttgtctcagccattccaggttgctgaggtcttcacaggtcatatggggaagctggtacccctgaaggagaccatcaaaggattccagcagattttggcaggtgaatatgaccatctcccagaacaggccttctatatggtgggacccattgaagaagctgtggcaaaagctgataagctggctgaagagcattcatcgtgaggggtctttgtcctctgtactgtctctctccttgcccctaacccaaaaagcttcatttttctgtgtaggctgcacaagagccttgattgaagatatattctttctgaacagtatttaaggtttccaataaaatgtacacccctcagaaaaaaaaaaaaaaaa

SEQ ID NO: 330 - DNA, 5464 bp, Homo Sapiens
cctcccctggggaggctcgcgttcccgctgctcgcgcctgcgccgcccgccggcctcaggaacgcgccctcttcgccggcgcgcgccctcgcagtcaccgccacccaccagctccggcaccaacagcagcgccgctgccaccgcccaccttctgccgccgccaccacagccaccttctcctcctccgctgtcctctcccgtcctcgcctctgtcgactatcaggtgaactttgaaccaggatggctgagccccgccaggagttcgaagtgatggaagatcacgctgggacgtacgggttgggggacaggaaagatcaggggggctacaccatgcaccaagaccaagagggtgacacggacgctggcctgaaagctgaagaagcaggcattggagacacccccagcctggaagacgaagctgctggtcacgtgacccaagctcgcatggtcagtaaaagcaaagacgggactggaagcgatgacaaaaaagccaagggggctgatggtaaaacgaagatcgccacaccgcggggagcagcccctccaggccagaagggccaggccaacgccaccaggattccagcaaaaaccccgcccgctccaaagacaccacccagctctggtgaacctccaaaatcaggggatcgcagcggctacagcagccccggctccccaggcactcccggcagccgctcccgcaccccgtcccttccaaccccacccacccgggagcccaagaaggtggcagtggtccgtactccacccaagtcgccgtcttccgccaagagccgcctgcagacagcccccgtgcccatgccagacctgaagaatgtcaagtccaagatcggctccactgagaacctgaagcaccagccgggaggcgggaaggtgcaaatagtctacaaaccagttgacctgagcaaggtgacctccaagtgtggctcattaggcaacatccatcataaaccaggaggtggccaggtggaagtaaaatctgagaagcttgacttcaaggacagagtccagtcgaagattgggtccctggacaatatcacccacgtccctggcggaggaaataaaaagattgaaacccacaagctgaccttccgcgagaacgccaaagccaagacagaccacggggcggagatcgtgtacaagtcgccagtggtgtctggggacacgtctccacggcatctcagcaatgtctcctccaccggcagcatcgacatggtagactcgccccagctcgccacgctagctgacgaggtgtctgcctccctggccaagcagggtttgtgatcaggcccctggggcggtcaataattgtggagaggagagaatgagagagtgtggaaaaaaaaagaataatgacccggcccccgccctctgcccccagctgctcctcgcagttcggttaattggttaatcacttaacctgcttttgtcactcggctttggctcgggacttcaaaatcagtgatgggagtaagagcaaatttcatctttccaaattgatgggtgggctagtaataaaatatttaaaaaaaaacattcaaaaacatggccacatccaacatttcctcaggcaattccttttgattcttttttcttccccctccatgtagaagagggagaaggagaggctctgaaagctgcttctgggggatttcaagggactgggggtgccaaccacctctggccctgttgtgggggtgtcacagaggcagtggcagcaacaaaggatttgaaacttggtgtgttcgtggagccacaggcagacgatgtcaaccttgtgtgagtgtgacgggggttggggtggggcgggaggccacgggggaggccgaggcaggggctgggcagaggggagaggaagcacaagaagtgggagtgggagaggaagccacgtgctggagagtagacatccccctccttgccgctgggagagccaaggcctatgccacctgcagcgtctgagcggccgcctgtccttggtggccgggggtgggggcctgctgtgggtcagtgtgccaccctctgcagggcagcctgtgggagaagggacagcgggtaaaaagagaaggcaagctggcaggagggtggcacttcgtggatgacctccttagaaaagactgaccttgatgtcttgagagcgctggcctcttcctccctccctgcagggtagggggcctgagttgaggggcttccctctgctccacagaaaccctgttttattgagttctgaaggttggaactgctgccatgattttggccactttgcagacctgggactttagggctaaccagttctctttgtaaggacttgtgcctcttgggagacgtccacccgtttccaagcctgggccactggcatctctggagtgtgtgggggtctgggaggcaggtcccgagccccctgtccttcccacggccactgcagtcacccctgtctgcgccgctgtgctgttgtctgccgtgagagcccaatcactgcctatacccctcatcacacgtcacaatgtcccgaattcccagcctcaccaccccttctcagtaatgaccctggttggttgcaggaggtacctactccatactgagggtgaaattaagggaaggcaaagtccaggcacaagagtgggaccccagcctctcactctcagttccactcatccaactgggaccctcaccacgaatctcatgatctgattcggttccctgtctcctcctcccgtcacagatgtgagccagggcactgctcagctgtgaccctaggtgtttctgccttgttgacatggagagagccctttcccctgagaaggcctggccccttcctgtgctgagcccacagcagcaggctgggtgtcttggttgtcagtggtggcaccaggatggaagggcaaggcacccagggcaggcccacagtcccgctgtcccccacttgcaccctagcttgtagctgccaacctcccagacagcccagcccgctgctcagctccacatgcatagtatcagccctccacacccgacaaaggggaacacacccccttggaaatggttcttttcccccagtcccagctggaagccatgctgtctgttctgctggagcagctgaacatatacatagatgttgccctgccctccccatctgcaccctgttgagttgtagttggatttgtctgtttatgcttggattcaccagagtgactatgatagtgaaaagaaaaaaaaaaaaaaaaaaggacgcatgtatcttgaaatgcttgtaaagaggtttctaacccaccctcacgaggtgtctctcacccccacactgggactcgtgtggcctgtgtggtgccaccctgctggggcctcccaagttttgaaaggctttcctcagcacctgggacccaacagagaccagcttctagcagctaaggaggccgttcagctgtgacgaaggcctgaagcacaggattaggactgaagcgatgatgtccccttccctacttccccttggggctccctgtgtcagggcacagactaggtcttgtggctggtctggcttgcggcgcgaggatggttctctctggtcatagcccgaagtctcatggcagtcccaaaggaggcttacaactcctgcatcacaagaaaaaggaagccactgccagctggggggatctgcagctcccagaagctccgtgagcctcagccacccctcagactgggttcctctccaagctcgccctctggaggggcagcgcagcctcccaccaagggccctgcgaccacagcagggattgggatgaattgcctgtcctggatctgctctagaggcccaagctgcctgcctgaggaaggatgacttgacaagtcaggagacactgttcccaaagccttgaccagagcacctcagcccgctgaccttgcacaaactccatctgctgccatgagaaaagggaagccgcctttgcaaaacattgctgcctaaagaaactcagcagcctcaggcccaattctgccacttctggtttgggtacagttaaaggcaaccctgagggacttggcagtagaaatccagggcctcccctggggctggcagcttcgtgtgcagctagagctttacctgaaaggaagtctctgggcccagaactctccaccaagagcctccctgccgttcgctgagtcccagcaattctcctaagttgaagggatctgagaaggagaaggaaatgtggggtagatttggtggtggttagagatatgcccccctcattactgccaacagtttcggctgcatttcttcacgcacctcggttcctcttcctgaagttcttgtgccctgctcttcagcaccatgggccttcttatacggaaggctctgggatctcccccttgtgggggcaggctcttggggccagcctaagatcatggtttagggtgatcagtgctggcagataaattgaaaaggcacgctggcttgtgatcttaaatgaggacaatccccccagggctgggcactcctcccctcccctcacttctcccacctgcagagccagtgtccttgggtgggctagataggatatactgtatgccggctccttcaagctgctgactcactttatcaatagttccatttaaattgacttcagtggtgagactgtatcctgtttgctattgcttgttgtgctatggggggaggggggaggaatgtgtaagatagttaacatgggcaaagggagatcttggggtgcagcacttaaactgcctcgtaacccttttcatgatttcaaccacatttgctagagggagggagcagccacggagttagaggcccttggggtttctcttttccactgacaggctttcccaggcagctggctagttcattccctccccagccaggtgcaggcgtaggaatatggacatctggttgctttggcctgctgccctctttcaggggtcctaagcccacaatcatgcctccctaagaccttggcatccttccctctaagccgttggcacctctgtgccacctctcacactggctccagacacacagcctgtgcttttggagctgagatcactcgcttcaccctcctcatctttgttctccaagtaaagccacgaggtcggggcgagggcagaggtgatcacctgcgtgtcccatctacagacctgcggcttcataaaacttctgatttctcttcagctttgaaaagggttaccctgggcactggcctagagcctcacctcctaatagacttagccccatgagtttgccatgttgagcaggactatttctggcacttgcaagtcccatgatttcttcggtaattctgagggtggggggagggacatgaaatcatcttagcttagctttctgtctgtgaatgtctatatagtgtattgtgtgttttaacaaatgatttacactgactgttgctgtaaaagtgaatttggaaataaagttattactctgattaaa

SEQ ID NO: 331 - DNA, 1897 bp, Homo Sapiens
cccggggggagccggcggccggcgcgggcgcggcgggccgggcaggggcgaggggcgccgggtcttgccccagaagctgcgggcacatccacgcctgaaatgcggcgctcagtcctggtcaggaacccaggccacaaaggcctgagacccgtttatgaagagctcgactctgactccgaggacctagaccccaatcctgaagatctggacccggtttctgaagacccagagcctgatcctgaagacctcaacactgtcccggaagacgtggaccccagctatgaagatctggagcccgtctcggaggatctggaccccgacgccgaagctccgggctcggaaccccaagatcccgaccccatgtcttcgagtttcgacctcgatccagatgtgattggccccgtacccctgattctcgatcctaacagcgacaccctcagccccggcgatccaaaagtggaccccatctcctctggcctcactgccaccccccaggtcttggccaccagccccgcggtgctccccgcccccgccagcccgccccggcccttctcctgcccggattgcgggcgagccttccgccgcagctccgggctgagccagcatcgccgcacgcacagcggcgagaagccgtaccgctgccccgactgcgggaagtccttcagccacggtgccaccctggctcagcaccgtggcatccacactggggcgcggccgtaccagtgcgcggcctgcggcaaggccttcggctggcgctccacgctgctgaaacatcgcagcagccacagcggggagaagccgcaccactgcccggtgtgtggcaaggccttcgggcacggctcgctcctggcacagcacctgcgcacgcacggcggcccgcggccccacaagtgcccggtgtgcgccaagggcttcggccagggctctgcgctgctcaaacacctgcgcacgcacacgggcgagcggccctacccgtgtccgcagtgcggcaaggccttcgggcagagctcggcgctgctgcagcaccagcgcacacacacggccgagcgcccctaccgctgcccccactgcggcaaagccttcgggcagagctccaacttgcaacaccacctgcgcatccacacgggcgagcggccctacgcctgcccgcactgctccaaggccttcggccagagctcagcgctgctccagcacctgcacgtgcattcgggcgagcgtccctatcgctgtcagctctgcgggaaggccttcggccaggcctccagcctcaccaagcacaaacgggtgcatgagggtgcagccgctgctgcagctgccgcggccgctgcagctgcagcagcggccgccggcctgggcctcgggcctggcctaagccctgcatccatgatgaggccggggcaggtctccctcctgggtcctgatgctgtttctgtgctcggctctggcttgggcctcagccctggcaccagctctggccgcaaccctgaccctggctctgggccgggcactctgccggatcccagctccaaacccctccccggctccagatccacccccagccctactcctgtggaatcttctgacccaaaggctgggcacgacgctggtcccgaccttgtgcccagcccagaccttgatcctgtgcccagcccagaccctgatcctgtgcccagccctgatcccaaccctgtgtcctgccctgacccctgttctcccactcgtggcactgtcagcccagccctccctaccggcgagagtccagagtgggtacaggagcaaggggcactgctggggcctgatggctgaaggagacgccggcatcctcgggggcctggggaagttgtgtgttgtgcagtcagtaaaatcctcccactgcctccggaaaaaaaaaaaaaaa

SEQ ID NO: 332 - DNA, 1618 bp, Homo Sapiens
tcagagttcacgaggcagccgaggaagaggaggcttgaggcccagggtgggcaccagccagccatggccacagccgagaccgccttgccctccatcagcacactgaccgccctgggccccttcccggacacacaggatgacttcctcaagtggtggcgctccgaagaggcgcaggacatgggcccgggtcctcctgaccccacggagccgcccctccacgtgaagtctgaggaccagcccggggaggaagaggacgatgagaggggcgcggacgccacctgggacctggatctcctcctcaccaacttctcgggcccggagcccggtggcgcgccccagacctgcgctctggcgcccagcgaggcctccggggcgcaatatccgccgccgcccgagactctgggcgcatatgctggcggcccggggctggtggctgggcttttgggttcggaggatcactcgggttgggtgcgccctgccctgcgagcccgggctcccgacgccttcgtgggcccagccctggctccagccccggcccccgagcccaaggcgctggcgctgcaaccggtgtacccggggcccggcgccggctcctcgggtggctacttcccgcggaccgggctttcagtgcctgcggcgtcgggcgccccctacgggctactgtccgggtaccccgcgatgtacccggcgcctcagtaccaagggcacttccagctcttccgcgggctccagggacccgcgcccggtcccgccacgtccccctccttcctgagttgtttgggacccgggacggtgggcactggactcggggggactgcagaggatccaggtgtgatagccgagaccgcgccatccaagcgaggccgacgttcgtgggcgcgcaagaggcaggcagcgcacacgtgcgcgcacccgggttgcggcaagagctacaccaagagctcccacctgaaggcgcatctgcgcacgcacacaggggagaagccatacgcctgcacgtgggaaggctgcggctggagattcgcgcgctcggacgagctgacccgccactaccggaaacacacggggcagcgccccttccgctgccagctctgcccacgtgctttttcgcgctctgaccacctggccttgcacatgaagcgccacctttgagccctgccctggcacttggactctcctagtgactggggatgggacaagaagcctgtttggtggtctcttcacacggacgcgcgtgacacaatgctgggtggttttcccacgaatggaccctctcctggactcgcgttcccaaagatccacccaaatatcaaacacggacccatagacagccctgggggagcctcttacggaaaatccgacaagccttcagccacagggagccacacagagatgtccaaactgtcgtgcaaacccagtgagacagaccgccaaataaacggactcagtggacactcagaccagctcccagatggccctggacagcaggagagggtgtgggatgaggcttcccagagaccctgggtctagaaagcggctcctgaaggtcccttattgtggctgatattaactgtcaatggttatgggtcctataaaaatgcccctcccagataaaaaa

SEQ ID NO: 333 - DNA, 1537 bp, Homo Sapiens
aagcggcgcaccgttaagatggcggctgggctgcggaaacgcggccggtccggttccgcggcccaggcagagggactctgcaagcaatggctgcagcgcgcctggcaagagcggcgcctgctgctgcgggagccgcgctacacgctgctggtggccgcctgcctctgcctggcggaggtgggcatcaccttctgggtcattcacagggtggcatacacagagattgactggaaggcctacatggccgaggtagaaggcgtcatcaatggtacctatgactatacccaactgcagggtgacaccggaccacttgtgtacccagctggtttcgtgtacatctttatggggttgtactatgccaccagccgaggcactgacatccgcatggcccagaacatctttgctgtgctctacctggctaccttgctgcttgtcttcttgatctatcaccagacctgcaaggtacctcccttcgtctttttcttcatgtgctgcgcctcttaccgtgtccactccatctttgtgctgcggctcttcaatgacccagtggccatggtgctgctcttcctcagtatcaacctcctgctggcccagcgctggggctggggttgctgctttttcagcctggcagtctctgtgaagatgaatgtgctgctcttcgcccctgggttactgtttcttctcctcacacagtttggcttccgtggggccctccccaagctgggaatctgtgctggccttcaggtggtgctggggctgcccttcctgctggagaaccccagcggctacctgtcccgctcctttgaccttggccgccagtttctgttccactggacagtgaactggcgcttcctcccagaggcgctcttcctgcatcgagccttccacctggccctgttgactgcccacctcaccctgctcctgctgtttgccctctgcaggtggcacaggacaggggaaagtatcttgtcgctgctgagggatccctccaaaaggaaggttccaccccagccccttacacccaaccagatcgtttctaccctcttcacctccaacttcattggcatctgcttcagccgctccctccactaccagttctacgtctggtatttccacacactgccctacctcctgtgggccatgcctgcacgctggctcacacacctgctcaggttgttggtgctggggctcatcgagctctcctggaacacatacccttccacatcctgcagctctgctgccctgcacatatgccatgccgtcatcctgctgcagctctggctgggcccgcagcctttccccaagagcacccaacacagcaagaaagcccactgaagtccacccctttccctcaggacctgagtctaccctcaggacctggggttggttggactctgcccttccaaataaaccttgctaagtccaactctgtgcaacctacatggaggtgggggcagccgatgcctggtccaggctgtgagggacacgtatggagcagataaagaattcactcaagcagtaaaaaaaaaaaaaaaaa

SEQ ID NO: 334 - DNA, 3187 bp, Homo Sapiens
ctgcagtagcggggttggggtgggagtgagagagtgaggacgctgggctgggggaaacgggaagccgctgcaagtccaccgcctcagctacccagattgggatctgcccaggcccgctttatggactagtgtgggcggcaggctcctttccgtccctgccctgctgtaccccgctccttggagaccccctgtatccctcccgcaaggtggaatccgcaggctggaggctcccaggggaggcaaacgcctggccctgccctgccccacgccgcaccatgaccctcctgctgctgccccttctgctggcctctctgctcgcgtcctgctcctgtaacaaagccaacaagcacaagccatggattgaggcagagtaccagggcatcgtcatggagaatgacaacacggtcctactgaatccaccactctttgccttggacaaggatgccccgctgcgctatgcaggtgagatctgcggcttccggctccatgggtctggggtgccctttgaggctgtgatccttgacaaggcgacaggagaggggctgatccgggccaaggagcctgtggactgcgaggcccagaaggaacacaccttcaccatccaggcctatgactgtggcgagggccccgacggggccaacaccaagaagtcccacaaggccactgtgcatgtgcgggtcaacgatgtgaacgagtttgccccagtgtttgtggaacggctgtatcgtgcggctgtgacagaggggaagctgtacgatcgcatcctgcgggtggaagccattgacggtgactgctccccccagtacagccagatctgctactatgagattctcacacccaacacccctttcctcattgacaatgacgggaacattgagaacacagagaagctgcagtacagtggtgagaggctctataagtttacagtgacagcttatgactgtgggaagaagcgggcagcagatgatgctgaggtggagattcaggtgaagcccacctgtaaacccagctggcaaggctggaacaaaaggatcgaatatgcaccaggtgctgggagcttggctttgttccctggtatccgcctggagacctgtgatgaaccactctggaacattcaggccaccatagagctgcagaccagccatgtggccaagggctgtgaccgtgacaactactcagagcgggcgctgcggaaactctgtggtgctgccactggggaggtggatctgttgcccatgcctggccccaatgccaactggacagcaggactctcggtgcactacagccaggacagcagcctgatctactggttcaatggcacccaggctgtgcaggtgcccctgggtggccccagtgggctgggctctgggccccaggacagcctcagtgaccacttcaccctgtccttctggatgaagcatggcgtaactcccaacaagggcaagaaggaagaggaaaccatcgtatgtaacactgtccagaatgaggacggcttctctcactactcgctgactgtccacggctgtaggattgccttcctctactggcccctgcttgagagtgcccgcccagtcaagttcctctggaagctggagcaggtctgtgatgatgagtggcaccactacgctctgaacctcgagttccccacagtcacactctataccgacggcatctccttcgaccctgccctcatccatgacaatggcctcatccacccaccccgaagggagcctgctctcatgattggggcctgctggactgaggagaagaacaaagagaaggaaaagggagacaacagtacagacaccacccaaggagaccctttgtcgatccaccactacttccatggctacctggctggtttcagcgtgcgctcaggtcgcctggagagccgcgaggtcatcgagtgcctctatgcatgtcgggaggggctggactatagggatttcgagagcctgggcaaaggcatgaaggtccacgtgaacccctcacagtccctgctcaccctggagggggatgatgtggagaccttcaaccatgccctgcagcatgtggcttacatgaacactctgcgctttgccacgcccggcgtcaggcccctgcgcctcaccactgctgtcaagtgcttcagcgaagagtcctgcgtctccatccctgaagtggagggctacgtggtcgtccttcagcctgacgccccccagatcctgctgagtggcactgctcattttgcccgcccagctgtggactttgagggaaccaacggcgtccctttgttccctgatcttcaaatcacctgctccatttctcaccaggtggaggccaaaaaggatgagagttggcagggcacagtgacagacacacgcatgtcggatgagattgtgcacaacctggatggctgtgaaatttctctggtgggggatgacctggatcccgagcgggaaagcctgctcctggacacaacctctctgcagcagcgggggctggagctcaccaacacatctgcctacctcactattgctggggtggagagcatcactgtgtatgaagagatcctgaggcaggctcgttatcggctgcgacacggagctgccctctacaccaggaagttccggctttcctgctcggaaatgaatggccgttactccagcaatgaattcatcgtggaggtcaatgtcctgcacagcatgaaccgggttgcccaccccagccacgtgctcagctcccagcagttcctgcaccgtggtcaccagcccccgcctgagatggctggacacagcctagccagctcccacagaaactccatgatacccagcgccgcaaccctcatcattgtggtgtgcgtgggcttcctggtgctcatggtcgtcctgggcctggtgcgcatccattcccttcaccgccgcgtctcaggggccggcgggcctccaggggcctccagtgaccccaaggacccagacctcttctgggatgactcagctctcaccatcattgtgaaccccatggagtcctaccagaatcggcagtcctgtgtgacgggggctgttgggggccagcaggaggatgaggacagcagtgactcggaggtggccgattcccccagcagcgacgagagacgcatcatcgagacccccccacaccgctactaaggcctacacctctccccacgcagagggggaattctgccctg

SEQ ID NO: 335 - DNA, 4353 bp, Homo Sapiens
atgtggcaagaccacagcccgggcacctcggtggttagagagcctgtggcagggcgcaggttcctgggctcccccagacctgctgctgaagaatcaggactggaggtctgcattttgagcacacacacagtaaggcctgagagccctggggggcctgcaatctggatgcactgtaagacctcaggagttagagatgtccctggtgggcagagggccttggcctggttctctctggagcactgtggggtgctcgtctgcctgggcagggacataggagcagggcaggccctggaccggggacatttgcatgaccgctacggacagctggtgaatgtctacaccaagctgctgctgaccaagatctccttccacctcaagcatccccagtttcccgcgggcctggaggtgacagatgaggtactggagaaggcagctgggaccgatgtcaacaacatcttccagctcactgtggagatgtttgattacatggattgtgagctgaagctttctgaatcagttttccgacagctcaacacggccatcgccgtatcccagatgtcctcaggccagtgccgcctggcccccctcatccaggtcatccaggactgcagccacctctaccactacacggtcaagctcctgttcaagctacactcttgtctccctgcggacaccctgcaaggccacagggaccggttccacgagcagtttcacagcctcaggaacttcttccgcagagcctccgacatgctgtacttcaagcggctcatccagatcccccggctgcccgagggaccccctaacttcctgcgggcctcagccctggctgagcacatcaagccggtggtggtgatccccgaggaggccccggaagatgaggagccggagaatctcattgagatcagcacagggccccccgcgggggagccagtggtggtggctgacctcttcgatcagacgtttggaccccccaatgggtctgtgaaggacgacagggacctccagattgagagcttgaagagagaggtggaaatgctccgctctgaactggagaagatcaagctggaggcccagcggtacatcgcgcagctgaagagccaggtgaatgcactggagggtgagctggaggagcagcggaagcagaagcagaaggccctggtggataatgagcagctccgccacgagctggcccagctgagggctgcccagctggagggcgagcggagccagggcctgcgtgaggaggctgagaggaaggccagtgccacggaggcgcgctacaacaagctgaaggaaaagcacagtgagctcgtccatgtgcacgcggagctgctcagaaagaacgcggacacagccaagcagctgacggtgacgcagcaaagccaggaggaggtggcgcgggtgaaggagcagctggccttccaggtggagcaggtgaagcgggagtcggagttgaagctagaggagaagagcgaccagctggagaagctcaagagggagctggaggccaaggccggagagctggcccgcgcgcaggaggccctgagccacacagagcagagcaagtcggagctgagctcacggctggacacgctgagtgcggagaaggatgctctgagtggagctgtgcggcagcgggaggcagacctgctggcggcgcagagcctggtgcgcgagacagaggcggcgctgagccgggagcagcagcgcagctcccaggagcagggcgagttgcagggccggctggcagagagggagtctcaggagcaggggctgcggcagaggctgctggacgagcagttcgcagtgttgcggggcgctgctgccgaggccgcgggcatcctgcaggatgccgtgagcaagctggacgaccccctgcacctgcgctgtaccagctccccagactacctggtgagcagggcccaggaggccttggatgccgtgagcaccctggaggagggccacgcccagtacctgacctccttggcagacgcctccgccctggtggcagctctgacccgcttctcccacctggctgcggataccatcatcaatggcggtgccacctcgcacctggctcccaccgaccctgccgaccgcctcatagacacctgcagggagtgcggggcccgggctctggagctcatggggcagctgcaggaccagcaggctctgcggcacatgcaggccagcctggtgcggacacccctgcagggcatccttcagctgggccaggaactgaaacccaagagcctagatgtgcggcaggaggagctgggggccgtggtcgacaaggagatggcggccacatccgcagccattgaagatgctgtgcggaggattgaggacatgatgaaccaggcacgccacgccagctcgggggtgaagctggaggtgaacgagaggatcctcaactcctgcacagacctgatgaaggctatccggctcctggtgacgacatccactagcctgcagaaggagatcgtggagagcggcaggggggcagccacgcagcaggaattttacgccaagaactcgcgctggaccgaaggcctcatctcggcctccaaggctgtgggctggggagccacacagctggtggaggcagctgacaaggtggtgcttcacacgggcaagtatgaggagctcatcgtctgctcccacgagatcgcagccagcacggcccagctggtggcggcctccaaggtgaaggccaacaagcacagcccccacctgagccgcctgcaggaatgttctcgcacagtcaatgagagggctgccaatgtggtggcctccaccaagtcaggccaggagcagattgaggacagagacaccatggatttctccggcctgtccctcatcaagctgaagaagcaggagatggagacgcaggtgcgtgtcctggagctggagaagacgctggaggctgaacgcatgcggctgggggagttgcggaagcaacactacgtgctggctggggcatcaggcagccctggagaggaggtggccatccggcccagcactgccccccgaagtgtaaccaccaagaaaccacccctggcccagaagcccagcgtggcccccagacaggaccaccagcttgacaaaaaggatggcatctacccagctcaactcgtgaactactaggccccccaggggtccagcagggtggctggtgacaggcctgggcctctgcaactgccctgacaggaccgagaggccttgcccctccacctggtgcccaagcctcccgccccaccgtctggatcaatgtcctcaaggcccctggcccttactgagcctgcagggtcctgggccatgtgggtggtgcttctggatgtgagtctcttatttatctgcagaaggaactttggggtgcagccaggacccggtaggcctgagcctcaactcttcagaaaatagtgtttttaatattcctcttcagaaaatagtgtttttaatattccgagctagagctcttcttcctacgtttgtagtcagcacactgggaaaccgggccagcgtggggctccctgccttctggactcctgaaggtcgtggatggatggaaggcacacagcccgtgccggctgatgggacgagggtcaggcatcctgtctgtggccttctggggcaccgattctaccaggccctccagctgcgtggtctccgcagaccaggctctgtgtgggctagaggaatgtcgcccattactcctcaggcctggccctcgggcctccgtgatgggagccccccaggaggggtcagatgctggaaggggccgctttctggggagtgaggtgagacatagcggcccaggcgctgccttcactcctggagagtttccatttccagctggaatctgcagccacccccatttcctgttttccattcccccgttctggccgcgccccactgcccacctgaaggggtggtttccagccctccggagagtgggcttggccctaggccctccagctcagccagaaaaagcccagaaacccaggtgctggaccagggccctcagggaggggaccctgcggctagagtgggctaggccctggctttgcccgtcagatttgaacgaatgtgtgtcccttgagcccaaggagagcggcaggaggggtgggaccaggctgggaggacagagccagcagctgccatgccctcctgctccccccaccccagccctagccctttagcctttcaccctgtgctctggaaaggctaccaaatactggccaaggtcaggaggagcaaaaatgagccagcaccagcgccttggctttgtgttagcatttcctcctgaagtgttctgttggcaataaaatgcactttgactgtttgttgtca

SEQ ID NO: 336 - DNA, 1700 bp, Homo Sapiens
gcagccgcccgggcccccgccagcctccctcctcgcgtccctcggtgtcctccgcgggccggcgcgatgcggctgggcccgaggaccgcggcgttggggctgctgctgctgtgcgccgccgcggccggcgccggcaaggccgaggagctgcactacccgctgggcgagcgccgcagcgactacgaccgcgaggcgctgctgggcgtccaggaagatgtggatgaatatgttaaactcggccacgaagagcagcaaaaaagactgcaggcgatcataaagaaaatcgacttggactcagatggctttctcactgaaagtgaactcagttcatggattcagatgtcttttaagcattatgctatgcaagaagcaaaacaacagtttgttgaatatgataaaaacagtgatgatactgtgacttgggatgaatataacattcagatgtatgatcgtgtgattgactttgatgagaacactgctctggatgatgcagaagaggagtcctttaggaagcttcacttaaaggacaagaagcgatttgaaaaagctaaccaggattcaggtcccggtttgagtcttgaagaatttattgcttttgagcatcctgaagaagttgattatatgacggaatttgtcattcaagaagctttagaagaacatgacaaaaatggtgatggatttgttagtttggaagaatttcttggtgattacaggtgggatccaactgcaaatgaagatccagaatggatacttgttgagaaagacagattcgtgaatgattatgacaaagataacgatggcaggcttgatccccaagagctgttaccttgggtagtacctaataatcagggcattgcacaagaggaggcgcttcatctaattgatgaaatggatttgaatggtgacaaaaagctctctgaagaagagattctggaaaacccggacttgtttctcaccagtgaagccacagattatggcagacagctccatgatgactatttctatcatgatgagctttaatctccgagcctgtctcagtagagtactggctccttttataatttgttaccagctttacttttgtgataaaatattgatgttgtattttacactcttaagtcttaaccacagtcagaattatcttaatgtagaattataattttggctcttttaggaaaaaacaaaatctgatatttttccaaacgtattgagcaacaaaatattaatattgtgccatatgacaacaaagtctttcctaaatactccatctgtttagtactgtattgtggaatatttgagttctatttccagacttgaaaacatggaggattttagagatgcctgaacaatattatttaagtagtatgtgaccgagctataaattttttgtttttgttctaagtagatttaatttgggaactgacaggacaatgtttttaggtttagcattttgtttaaaaacctttaaagaaacctttagaaggacttagacctcacatattaatgttgagaagttctgcttaattttaaaatggtttctataaagggttttattgtatgaaatagaactttatatttttgcatatgtatagaggataattatatttaatgtataactatagcattatggtgagtggaatttgacattgtccaaacctttttcatttttgagtgattaaaaatgaaatgtcctttgtaaa

SEQ ID NO: 337 - DNA, 4889 bp, Homo Sapiens
cccgcctagcatggtgcggcggccgcgcgcgcggacatgggggagaagctggagctgagactgaagtcgcccgtgggggctgagcccgccgtctacccgtggccgctgccggtctacgataaacatcacgatgctgctcatgaaatcatcgagaccatccgatgggtctgtgaagaaatcccggatctcaagctcgctatggagaattacgttttaattgactatgacaccaaaagcttcgagagcatgcagaggctctgcgacaagtacaaccgtgccatcgacagcatccaccagctgtggaagggcaccacgcagcccatgaagctgaacacgcggccgtccactggactcctgcgccatatcctgcagcaggtctacaaccactcggtgaccgaccccgagaagctcaacaactacgagcccttctcccccgaggtgtacggggagacctccttcgacctggtggcccagatgattgatgagatcaagatgaccgacgacgacctgtttgtggacttggggagcggtgtgggccaggtcgtgctccaggttgctgctgccaccaactgcaaacatcactatggcgtcgagaaagcagacatcccggccaagtatgcggagaccatggaccgcgagttcaggaagtggatgaaatggtatggaaaaaagcatgcagaatacacattggagagaggcgatttcctctcagaagagtggagggagcgaatcgccaacacgagtgttatatttgtgaataattttgcctttggtcctgaggtggatcaccagctgaaggagcggtttgcaaacatgaaggaaggtggcagaatcgtgtcctcgaaaccctttgcacctctgaacttcagaataaacagtagaaacttgagtgacatcggcaccatcatgcgcgtggtggagctctcgcccctgaagggctcggtgtcgtggacggggaagccagtctcctactacctgcacactatcgaccgcaccatacttgaaaactatttttctagtctgaaaaacccaaaactcagggaggaacaggaggcagcccggcgccgccagcagcgcgagagcaagagcaacgcggccacgcccactaagggcccagagggcaaggtggccggccccgccgacgcccccatggactctggtgctgaggaagagaaggcgggagcagccaccgtgaagaagccgtctccctccaaagcccgcaagaagaagctaaacaagaaggggaggaagatggctggccgcaagcgcgggcgccccaagaagatgaacactgcgaaccccgagcggaagcccaagaagaaccaaactgcactggatgccctgcacgctcagaccgtgtctcagacggcggcctcctcaccccaggatgcctacagatcccctcacagcccgttctaccagctacctccgagcgtgcagcggcactcccccaacccgctgctggtggcgcccaccccgcccgcgctgcagaagcttctagagtccttcaagatccagtacctgcagttcctggcatacacaaagaccccccagtacaaggccagcctgcaggagctgctgggccaggagaaggagaagaacgcccagctcctgggtgcggctcagcagctcctcagccactgccaggcccagaaggaggagatcaggaggctgtttcagcaaaaattggatgagctgggtgtgaaggcgctgacctacaacgacctgattcaagcgcagaaggagatctccgcccataaccagcagctgcgggagcagtcggagcagctggagcaggacaaccgcgcgctccgcggccagagcttgcagctgctcaaggctcgctgcgaggagctgcagctggactgggccacgctgtcgctggagaagctgttgaaggagaagcaggccctgaagagccagatctcggagaagcagaggcactgcctggagctgcagatcagcattgtggagctagagaagagccagcggcagcaggagctcctgcagctcaagtcctgtgtgccgcctgacgacgccctgtccctgcacctgcgtgggaagggcgccctgggccgcgagctggagcctgacgccagccggctgcacctggagctggactgcaccaagttctcgctgcctcacttgagcagcatgagcccggagctctccatgaacggccaggctgctggctatgagctctgcggtgtgctgagccggccttcgtcgaagcagaacacgccccagtacctggcctcacccctggaccaggaggtggtgccctgtacccctagccacgtcggccggccgcgcctggagaagctgtctggcctagccgcacccgactacactaggctgtccccggccaagattgtgctgaggcggcacctgagccaggaccacacggtgcccggcaggccggctgccagtgagctgcattcgagagctgagcacaccaaggagaacggccttccctaccagagccccagcgtgcctggcagcatgaagctgagccctcaggacccgcggcccctgtcccctggggccttgcagcttgctggagagaagagcagtgagaagggcctgagagagcgcgcctacggcagcagcggggagctcatcaccagcctgcccatcagcatcccgctcagcaccgtgcagcccaacaagctcccggtcagcattcccctggccagcgtggtgctgcccagccgcgccgagagggcgaggagcacccccagtcccgtgctgcagccccgtgacccctcgtccacacttgaaaagcagattggtgctaatgcccacggtgctgggagcagaagccttgccctggcccccgcaggcttctcctacgctggctcggtggccatcagcggggccttggcgggcagcccggcctctctcacacctggagccgagccggccaccttggatgagtcctccagctctgggagcctttttgccaccgtggggtcccgcagctccacgccacagcaccccctgctgctggcacagccccggaactcgcttcctgcctctcccgcccaccagctctcctccagtccccggcttggtggggccgcccagggcccgttgcccgaggccagcaagggagacctgccctccgattccggcttctcagatcctgagagtgaagccaagaggaggattgtgttcaccatcaccactggtgcgggcagtgccaagcagtcgccctccagcaagcacagccccctgaccgccagcgcccgtggggactgtgtgccgagccacgggcaggacagtcgcaggcgcggccggcggaagcgagcatctgcggggacgcccagcttgagcgcaggcgtgtcccccaagcgccgagccctgccgtccgtcgctggccttttcacacagccttcggggtctcccctcaacctcaactccatggtcagtaacatcaaccagcccctggagattacagccatctcgtccccggagacctccctgaagagctcccctgtgccctaccaggaccacgaccagccccccgtgctcaagaaggagcggcctctgagccagaccaatggggcacactactccccactcacctcagacgaggagccaggctctgaggacgagcccagcagtgctcgaattgagagaaaaattgcaacaatctccttagaaagcaaatctcccccgaaaaccttggaaaatggtggtggcttggcgggaaggaagcccgcgcccgccggcgagccagtcaatagcagcaagtggaagtccaccttctcgcccatctccgacatcggcctggccaagtcggcggacagcccgctgcaggccagctccgccctcagccagaactccctgttcacgttccggcccgccctggaggagccctctgccgatgccaagctggccgctcaccccaggaaaggctttcccggctccctgtcgggggctgacggactcagcccgggcaccaaccctgccaacggctgcaccttcggcgggggcctggccgcggacctgagtttacacagcttcagtgatggtgcttctcttccccacaagggccccgaggcggccggcctgagctccccgctgagcttcccctcgcagcgcggcaaggagggctcggacgccaaccctttcctgagcaagaggcagctggacggcctggctgggctgaagggcgagggcagccgcggcaaggaggcaggggagggcggcctaccgctgtgcgggcccacggacaagaccccactgctgagcggcaaggccgccaaggcccgggaccgcgaggtcgacctcaagaatggccacaacctcttcatctctgcggcggccgtgcctcccggaagcctcctcagcggccccggcctggccccggcggcgtcctccgcaggcggcgcggcgtcctccgcccagacgcaccggtccttcctgggccccttcccgccgggaccgcagttcgcgctcggccccatgtccctgcaggccaacctcggctccgtggccggctcctccgtgctgcagtcgctgttcagctctgtgccggccgccgcaggcctggtgcacgtgtcgtccgctgccaccagactgaccaactcgcacgccatgggcagcttttccggggtggcaggcggcacagttggaggtaactaggatttctacctcaaccgcgagacctatgcaaggacggtgtggaccaactcgcgcccgcggcatggtgcccgccggcctgccgggctcccacccctggacggcagaggcaaggacggacgggagctccactgtgaatcggcggcacgcgccgcaggaggctgggactggtccagtttgtactgtcgatagttttagataaagtatttatcattttttaaaaagtaaaaaaaaaaaaaaaa

SEQ ID NO: 338 - DNA, 1455 bp, Homo Sapiens
ggcggcggcagggctgagccagcgacgccctccattcactctccgcgcccgttctccggctgtcctcccgttccgctgcccgccctgccaccatgacggaacaggccatctccttcgccaaagacttcttggccggaggcatcgccgccgccatctccaagacggccgtggctccgatcgagcgggtcaagctgctgctgcaggtccagcacgccagcaagcagatcgccgccgacaagcagtacaagggcatcgtggactgcattgtccgcatccccaaggagcagggcgtgctgtccttctggaggggcaaccttgccaacgtcattcgctacttccccactcaagccctcaacttcgccttcaaggataagtacaagcagatcttcctggggggcgtggacaagcacacgcagttctggaggtactttgcgggcaacctggcctccggcggtgcggccggcgcgacctccctctgcttcgtgtacccgctggattttgccagaacccgcctggcagcggacgtgggaaagtcaggcacagagcgcgagttccgaggcctgggagactgcctggtgaagatcaccaagtccgacggcatccggggcctgtaccagggcttcagtgtctccgtgcagggcatcatcatctaccgggcggcctacttcggcgtgtacgatacggccaagggcatgctccccgaccccaagaacacgcacatcgtggtgagctggatgatcgcgcagaccgtgacggccgtggccggcgtggtgtcctaccccttcgacacggtgcggcggcgcatgatgatgcagttcgggcgcaaaggagctgacatcatgtacacgggcaccgtcgactgttggaggaagatcttcagagatgaggggggcaaggccttcttcaagggtgcgtggtccaacgtcctgcggggcatggggggcgccttcgtgctggtcctgtacgacgagctcaagaaggtgatctaagggccgcggcctcctccacacacacacacaccaggggaaccaagagaaccacgtagaatcctcaaccgtgcggaccatcaaccttcgagaaattccagttgtctttttcccagccgcatcctgcctgtagatggccggggaaggctctagaaaaggggcgcattgcgatccaaccatcggcagccgattccgtgtcttgatcacggggtgggagggaaccgtggcgtccctgcgtggggcccatgggtgagacactccagtactgagacctagagtccagatgcttgtaggagccaagtcgtgttctaagtatttatttaaaacaaaagaatcacgttttcccatttgtacttcagcgctagcccctgttttgcacagccgagtactggcgagtatgttctatgttgggcctcctgctgcaaaacaataaacagaggacgcagaggtcaaaaaaaaaaaaaaaaaa

SEQ ID NO: 339 - DNA, 3376 bp, Homo Sapiens
ggcgaccgaacgcggcggtcggcagcgttcgcgcgggggcctgcgaagcgctgctcggggccggcactgcccgcggggaggacgcgccgccgccgccacccagcgccgccgccgccgccgcctccagccgggccgccgcgcgtcccgggggccggccccgcgagcgcaggagtaaacaccgccggagtcttggagccgctgcagaagggaataaagagagatgcagggatttgtgaggttacggcgccccagctgcaagatgcactagccggctgaacccgggatcggctgacttgttggaaccggagtgctctgcacggagagtggtggatgagttgaagttgccttcccggggctcattttccacgctgccgagaggaatccgagaggcaaggcaatcacttcgtcttgccattgattgggtatcgggagctttttttttctcccctctctctttcttttcctccgtcttgttgcatgcaagaaaattacagtccgctgctcgcccgccctgggtgcgagatattcagccccgctctctcccgtgcattgtgcaacccaaagatgaaagaccgaaggggagaaagttaaagaaatcgcccacatgcgctggatcagtccacggcttggggaaaggcatccagagaaggtgggagcggagagtttgaagtctttacaggcgggaagatggcggactggagctgaaagtgttgattgggaaacttgggtgattcttgtgtttatttacaatcctcttgacccaggcaggacacatgcaggccaaaaaacgctatttcatcctgctctcagctggctcttgtctcgcccttttgttttatttcggaggcttgcagtttagggcatcgaggagccacagccggagagaagaacacagcggtaggaatggcttgcaccaccccagtccggatcatttctggccccgcttcccggacgctctgcgccccttcgttccttgggatcaattggaaaacgaggattccagcgtgcacatttccccccggcagaagcgagatgccaactccagcatctacaaaggcaagaagtgccgcatggagtcctgcttcgatttcaccctttgcaagaaaaacggcttcaaagtctacgtatacccacagcaaaaaggggagaaaatcgccgaaagttaccaaaacattctagcggccatcgagggctccaggttctacacctcggaccccagccaggcgtgcctctttgtcctgagtctggatactttagacagagaccagttgtcacctcagtatgtgcacaatttgagatccaaagtgcagagtctccacttgtggaacaatggtaggaatcatttaatttttaatttatattccggcacttggcctgactacaccgaggacgtggggtttgacatcggccaggcgatgctggccaaagccagcatcagtactgaaaacttccgacccaactttgatgtttctattcccctcttttctaaggatcatcccaggacaggaggggagagggggtttttgaagttcaacaccatccctcctctcaggaagtacatgctggtattcaaggggaagaggtacctgacagggataggatcagacaccaggaatgccttatatcacgtccataacggggaggacgttgtgctcctcaccacctgcaagcatggcaaagactggcaaaagcacaaggattctcgctgtgacagagacaacaccgagtatgagaagtatgattatcgggaaatgctgcacaatgccactttctgtctggttcctcgtggtcgcaggcttgggtccttcagattcctggaggctttgcaggctgcctgcgtccctgtgatgctcagcaatggatgggagttgccattctctgaagtgattaattggaaccaagctgccgtcataggcgatgagagattgttattacagattccttctacaatcaggtctattcatcaggataaaatcctagcacttagacagcagacacaattcttgtgggaggcttatttttcttcagttgagaagattgtattaactacactagagattattcaggacagaatattcaagcacatatcacgtaacagtttaatatggaacaaacatcctggaggattgttcgtactaccacagtattcatcttatctgggagattttccttactactatgctaatttaggtttaaagcccccctccaaattcactgcagtcatccatgcggtgacccccctggtctctcagtcccagccagtgttgaagcttctcgtggctgcagccaagtcccagtactgtgcccagatcatagttctatggaattgtgacaagcccctaccagccaaacaccgctggcctgccactgctgtgcctgtcgtcgtcattgaaggagagagcaaggttatgagcagccgttttctgccctacgacaacatcatcacagacgccgtgctcagccttgacgaggacacggtgctttcaacaacagaggtggatttcgccttcacagtgtggcagagcttccctgagaggattgtggggtaccccgcgcgcagccacttctgggataactctaaggagcggtggggatacacatcaaagtggacgaacgactactccatggtgttgacaggagctgctatttaccacaaatattatcactacctatactcccattacctgccagccagcctgaagaacatggtggaccaattggccaattgtgaggacattctcatgaacttcctggtgtctgctgtgacaaaattgcctccaatcaaagtgacccagaagaagcagtataaggagacaatgatgggacagacttctcgggcttcccgttgggctgaccctgaccactttgcccagcgacagagctgcatgaatacgtttgccagctggtttggctacatgccgctgatccactctcagatgaggctcgaccccgtcctctttaaagaccaggtctctattttgaggaagaaataccgagacattgagcgactttgaggaatccggctgagtgggggaggggaagcaagaagggatgggggtcaagctgctctctcttcccagtgcagatccactcatcagcagagccagattgtgccaactatccaaaaacttagatgagcagaatgacaaaaaaaaaaaggccaatgagaactcaactcctggctcctgggactgcaccagactgctccaaactcacctcactggcttctgtgtcccaagactaggttgtgtacagtttaattatggaacattaaataattatttttgaaatgattgctatgcaggtttaaacttttttaatgatcaaaactattaaaaaccagagttctttgtttaatcaaaaaaaaaaaaaaaaa

SEQ ID NO: 340 - DNA, 1383 bp, Homo Sapiens
ctagtttctaaggatcatgtctgcgagccaggattcccgatccagagacaatggccccgatgggatggagcccgaaggcgtcatcgagagtaactggaatgagattgttgacagctttgatgacatgaacctctcggagtcccttctccgtggcatctacgcctatggttttgagaagccctctgccatccagcagcgagccattctaccttgtatcaagggttatgatgtgattgctcaagcccaatctgggactgggaaaacggccacatttgccatatcgattctgcagcagattgaattagatctaaaagccacccaggccttggtcctagcacccactcgagaattggctcagcagatacagaaggtggtcatggcactaggagactacatgggcgcctcctgtcacgcctgtatcgggggcaccaacgtgcgtgctgaggtgcagaaactgcagatggaagctccccacatcatcgtgggtacccctggccgtgtgtttgatatgcttaaccggagatacctgtcccccaaatacatcaagatgtttgtactggatgaagctgacgaaatgttaagccgtggattcaaggaccagatctatgacatattccaaaagctcaacagcaacacccaggtagttttgctgtcagccacaatgccttctgatgtgcttgaggtgaccaagaagttcatgagggaccccattcggattcttgtcaagaaggaagagttgaccctggagggtatccgccagttctacatcaacgtggaacgagaggagtggaagctggacacactatgtgacttgtatgaaaccctgaccatcacccaggcagtcatcttcatcaacacccggaggaaggtggactggctcaccgagaagatgcatgctcgagatttcactgtatccgccatgcatggagatatggaccaaaaggaacgagacgtgattatgagggagtttcgttctggctctagcagagttttgattaccactgacctgctggccagaggcattgatgtgcagcaggtttctttagtcatcaactatgaccttcccaccaacagggaaaactatatccacagaatcggtcgaggtggacggtttggccgtaaaggtgtggctattaacatggtgacagaagaagacaagaggactcttcgagacattgagaccttctacaacacctccattgaggaaatgcccctcaatgttgctgacctcatctgaggggctgtcctgccacccagccccagccagggctcaatctctgggggctgaggagcagcaggaggggggagggaagggagccaagggatggacatcttgtcattttttttctttgaataaatgtcactttttgaggcaaaagaagg

SEQ ID NO: 341 - DNA, 3898 bp, Homo Sapiens
cgagtgcgtgaagtgaaggcgattgagaggggctgagggaattgtcctctgtggaagggactttcttttggccctaggccccttcctgcccctgtcgtcagcagagtctctacaaggaagataacggactgtaaaattctataaagcaaagctacacatcacttgacaccatacaccatcttggttacataatgaagagagatggaaaacttgatgactagctccaccctaccgcccctttttgcagatgaagacggttccaaggagagtaatgatctggctaccactgggttaaatcacccagaggttccatacagtagtggcgccacatcatccaccaacaatccagaatttgtggaggatctctctcaaggtcagttgcttcagagtgagtcttcaaatgcagcagaaggcaatgaacagaggcatgaagatgagcaacgaagtaaacgaggaggttggtccaaaggaagaaagaggaagaaacctcttcgagacagcaatgcacccaaatccccccttacaggatatgttcggttcatgaatgagcgtcgagaacaacttcgagcaaagagaccagaagtcccatttccagaaatcacaaggatgttaggcaatgaatggagtaaactgcctcctgaggaaaaacagcgctaccttgatgaagcagacagagataaggagcgttacatgaaggaactggaacagtatcagaaaacagaggcctacaaggtcttcagtaggaaaacccaggaccgtcagaaaggcaaatctcataggcaagatgcagcccggcaggccactcatgatcatgagaaagaaacagaggtaaaggaacggtctgtttttgacatccctatatttacagaggaattcttgaaccatagcaaagctcgggaagcagagctccgccagcttcgcaaatccaacatggagtttgaggagaggaatgcagccctgcaaaagcacgtggagagcatgcgcacagcagtggagaagctggaggtggatgtgatccaggagcggagccgcaacacagtcttacagcagcacctggagaccctgcggcaggtgctgaccagcagctttgccagcatgcccttgcctggaagtggagagacacctacagtggacaccattgactcatatatgaacagactgcacagtattattttagctaatccccaagacaatgaaaacttcatagctacagttcgagaagttgtgaacagactcgatcgttagggaatggtcttagaactccaagatgttccataagtgtttttacttgtgaggaatgagaagccatccatggaaatttgaactgagtgggggcagagaaagagtgcagatccctttgcttgtgaaagaattatcagtgagtgaaaggccatcaccccaggaagccaaatgagggagcagcaacatgtatatgagcttcctatggaattgtccttatgtgaagctttgaaggtgtacagccactctcccgggtcttcaggttcctaccatttccatttctgttaaagtggatctgcatatcttcagcttactaggtgacccggatgctgacatctgctgctgcagaaaggaagacttttcattgtaatttcgcttagacccttttatcagtggagctccagttttcttacctagctgtcacttttttaaatgcctctgggggttatttttgctttccttggcccccaccaatttatacatctccattttctgacctctggactaactggttgctcagcaaggttctgaaggagagtttcttgcattggacaggcccagtcttctcccatcattgccctgctgtgactccaaagaaaggagcttcttgctgacagtgccctgtggagcaaggctgtgtttcctaccccacacggtgctcagtgggtgccagccctcagtgtggctttgtgattgctgccctaaaggagaatgctctttccttcctcactggtactgcctgctgttttctaagcattgctcctgcacagacatggagtcccagccccagcaaggctcttctgttcccatctgttgacaatgtcttgtggagcatttttgctgaggaaaaggtcacttgtaaacagaggagaaagggaaagagtacaaagccctaagtttattgtaagtgaaaactgagggaattcctgtcttctttaggagtaatgattcatagatctagataggtggaaatatcattcaaaatagtcacttgagctcacaaaaaaagcaaggaagaattctcatgtcctttgtcttccttctgtagccattaactgctgaatccatgtgaggaagacaggcttcccttccttccccctccttagtgattttttctttaacagcataagtaaagaggactttctggttcatttttgtttgttttgttttgttttgttttgtttacagatgaggtcttgctgtgttgcccaggctggagtgcggtggctattcacagatgctatcatagcacactacagcctccaactcttgggctcaagcatcacgcctagcagtttctggttcctttaacagcaaaaggaaagagaggttctgattcttacctcagggttttttggttgttcattgtttttgtttttgtttttgttttgacactgcagagcacaaggctaaaggttacagctgagatctttggaaccaaaggcagagcaagcagagcccgttgtctgggccccacaccactgcaggcaggtggatagaagtgcggcccctctcatagtatgcccataagtcagggcatagggcagaactacctgtcatgttgctacaccatcctgtcttctcagcatctccttgcctgttttctttattagtccaaaggaaaacaacagcaacaaaatctgtttttaaaatgtcttatatgaacatatatcaaatatccatgcgctgaaacccacataccatcacttggcaattttttagaataagaccccattattatctattgctataaacctagccagttctcttgctcttctgtattttcctatttccctgccatcatctgctatttctgccacttctcttagactccttgtctgcaaagcccaagctagaactcactgtctatggcagaaggacatccagagcccattctggagttttgttttttccttctgccagatgctttgtgtcctgtcttccttcctcctcatatttctgtttctcatttgtgttcagttttgtgcagcattgctagcactgcttttgtgaccagaaaaggccataacatggtccaggatcatcattcttctgactctagatgggacacttgacagtgacttgaaacatttgcatattcaggaatgcatgagatttcaagagagcctacagtatgaaatcattttcacaaaataagcagcttgcttctgaaatgctgtctttcccagtagctactcacctgcctctggtggctgggattcagatgccacaaaactgtcagtatctatagaccaggtctgtgccacctcctctctcctctgtgctcagtgaggaggcagtaaatgaagttacaggctagcacaatacctaattcatgtttcccagtacacctgtagatattactgtacttttatgttctcaagaaataagttgttgcctattcagtgttacagatttctttgtttctttttaattaaaatacaagaagcagctgaggaaagggagacaaggtattttatttctgactgattttagaaaaaacttgtgtacatgtgtttggaactgttgaaatgccaagttttctgtataagtgtttttgtaattaaactttcagattttctttgttttttaagaagttgatgtgcttgtttgacatttgtctcattaaaacttttctacgttgaaaaaaaaaaaaaaa

SEQ ID NO: 342 - DNA, 4748 bp, Homo Sapiens
cctcgcggggttgcggcgagcccggcccgcgaacgtcacgtccctgcgcgctccctgcactctcccgagctgcgctaggcgggcgccacggctgcccggcgaaggaaaccgaaaccgagtccgggcccgtccctccgcggccccatccgcccggtgcacccggggccgcgctcgccaggccgcggagcccagagctgcgcgcacgaaccgtgcgccgggagggcgtgggcgtggcgccgaagggtcccgggtcttcgacgcctctgcggcggctcctccctccttgcagttggatccctggcgggtgcggcccggcccggcccgtgagcggcgcacagaatgggccgatgctgcttctacacggcggggacgttgtccctgctcctgctggtgaccagcgtcacgctgctggtggcccgggtcttccagaaggctgtagaccagagtatcgagaagaaaattgtgttaaggaatggtactgaggcatttgactcctgggagaagccccctctgcctgtgtatactcagttctatttcttcaatgtcaccaatccagaggagatcctcagaggggagacccctcgggtggaagaagtggggccatacacctacagggaactcagaaacaaagcaaatattcaatttggagataatggaacaacaatatctgctgttagcaacaaggcctatgtttttgaacgagaccaatctgttggagaccctaaaattgacttaattagaacattaaatattcctgtattgactgtcatagagtggtcccaggtgcacttcctcagggagatcatcgaggccatgttgaaagcctatcagcagaagctctttgtgactcacacagttgacgaattgctctggggctacaaagatgaaatcttgtcccttatccatgttttcaggcccgatatctctccctattttggcctattctatgagaaaaatgggactaatgatggagactatgtttttctaactggagaagacagttaccttaactttacaaaaattgtggaatggaatgggaaaacgtcacttgactggtggataacagacaagtgcaatatgattaatggaacagatggagattcttttcacccactaataaccaaagatgaggtcctttatgtcttcccatctgacttttgcaggtcagtgtatattactttcagtgactatgagagtgtacagggactgcctgcctttcggtataaagttcctgcagaaatattagccaatacgtcagacaatgccggcttctgtatacctgagggaaactgcctgggctcaggagttctgaatgtcagcatctgcaagaatggtgcacccatcattatgtctttcccacacttttaccaagcagatgagaggtttgtttctgccatagaaggcatgcacccaaatcaggaagaccatgagacatttgtggacattaatcctttgactggaataatcctaaaagcagccaagaggttccaaatcaacatttatgtcaaaaaattagatgactttgttgaaacgggagacattagaaccatggttttcccagtgatgtacctcaatgagagtgttcacattgataaagagacggcgagtcgactgaagtctatgattaacactactttgatcatcaccaacataccctacatcatcatggcgctgggtgtgttctttggtttggtttttacctggcttgcatgcaaaggacagggatccatggatgagggaacagcggatgaaagagcacccctcattcgaacctaaacattgcctttgcttggtgaagaaactgtgtgagctgtcctgacctggacgatgacgtggggaaaccctccacctccttgcaggcttgttgcctgttgaaagaaggaaaaagacacggcgctggcaagtgataggaacattctggccagaggttaaagagcaggctgacatggctggccattaagctttataaaatcatgtgggctctgaaattgttcttttatgtgtctagcaagtatttaataaacccttgtatagtaattttgttgttgttgggtgctggtagctccagaattttgtgaccactattgtgggtaaaatgtctctgcatcacttgttaatgctactggtctaacttcattcagtatgcttcattcaccgaactttgtgctcaaaatgcgtatataccattttatgttgtattcctccatttcacttgcaaaacagaagtaaataagagttcgggacccagggtaaaatggtagcttcatccaatatatcattcaaatgcatctgatttctaaaacatattacattttatgctgatcttcagttcataattcttccaggaaaactcagtcttccaactgcaataaaatactgggtagaatcaaatgggaaaggggttgggtggggcaatacccatgagttgatagtgataagctcctaaggatttttaacttgtacttttgtgaacgaagagaatgcataaataatgttggtgaggataaagtacagatatttcatgtagaattaattgctagttatgatgcttgtggatagttaactgttttttttttagtcaaaatgatcatgctacgaaaagatgcttctgagagaatgtaatgagtaactgatttttcttcctgagtcgcccttgccaaatatgttactgtattaattaatctaatattgagtgattatttgtaaaattatgaatatgggaaatccatctatctacagcctaagttacacataagtttcagaaagtctgattagactaaagagatatttcttctgggacagccgccttcttggtaattttgaagttctttttacaagttccttcctcagtttcagttctttccagtgttttgtagctcactgtcactcactgaatagagaaacgtgtgccctatacttcctgtgacaatcattttgctgacagaatgatggatgtttaaaatattgcacaaagtactttaaagaaaggtctgttaggaccagaagcagagacaccacttttcaaaggacttcttggtttcagcataacctaagacagggaattgggagccatcatatgtcacagtgttcagaattcaagcatatttaagggcattttctttgattctcaaagttcagcattcattttgaattgagaagcctatacatttagctgacaaagtgcttatagaatttcttaacaactgaaccattcaaaaggattttttttgtttaaaactggatttcaatgtaagcaaatgaagaaaaaaatatagatttcatttccatagcttcttatccctgtattgaggtaataaattgttttactgacaatttttcctttttctacactaaaacaatatgtgatatatttcccctcttgaagaggcaattcattaaactctcaaattttctatagaatcaagatagaacctttagatactccaactcaccaaaatgtaaaaaaactaacaaaaatatttggtcttcaataatgctaaatatctacatttttagaatttatcaacatttaactagataattgggcatgtcttaattatgcatgtacttatccatactaataaaattgacaatgctagtgcatacttattggtttagtcctattatcaggatataatcatctgtgaggaggatattttaaatactgtaaatgataacagttaatgatatacacatttagactgagttgcacactggcagggagaccaaaaacattacttccatacttgtgtcatgattcttttttttttgagagagtctcactctgtcgccaggctggagtacagtggcatgatctcggctcactgcaacctctgcctcccgggttcaagcaattctcctgcctcagccacccaagtagctgggactacaggtgcgtgccaccacgcccagctaaattttgtatttttagtggagacggggtttcaccatgttggccaggatggtctcaatctcctgaccctgcgatctgcccacctcagcctcccaaagtgctgggattacaggcgtaagccaccgggcctggcctgttttatgattcttaatagttacttggtttaaatcacatttgatactatccttctgaaaagtctgagacagatctacaaactacagtcaaaattatagattaagaggaatgaatgcacctatttggctttaagttgaagatgaattatttctcatgctcattttcttgcggcagttatcttagaaagacccccaaaggctttgtgattgtaagcactgtcatgatcacagaatgcaagcttctggtaccatgatcctcaacttagagaggaagaaaccaagacagagagcttaactcacttctctcagggaaaattaggagttgagcacaggacaggaaatgggctttgccacttttagctccaggcttttctaaccagacttgatttcctcatgttctagaaagatcactaatggtcaagtggaacaagcactacacgactaacccctattggggtttttaacttaagggaggctaatttttaatttaaactgctcgagatatgagttctgcaaaaggtggtccgcatccttggccctctggacattatcactaaattgcttgtgcctgttaacaagaatactgaccagaatgctcttcatgtagcttatacagttggttcacttcatgcggttcttgacatgtttatttctacccttaatgcaatgaaatgtttcattaataaaaaaccactttatat

SEQ ID NO: 343 - DNA, 2327 bp, Homo Sapiens
gcgcggggcggggcttccgggcggggcaggctggcttccggcgggagcggggccgcggatggccgtatacagggcagcgctcggggcttcgctcgcggctgcccgactcttgcccctcggtcgctgttccccgtcgccggcgccccgctctacgttgtcgggcgccgccatggagcccgcgcctcgctggctggcggggctgcgcttcgacaaccgcgccctgcgcgccctgcccgtggaggcgccgccgcccggtcccgagggcgccccgtccgcgccgcggcccgtgcccggggcctgcttcacccgcgtgcagcccaccccgctgcggcagccgcgcctcgtggcgctgtcagagcccgcgctggcgttgctgggcctgggcgcgccgcccgcgcgcgaggccgaggccgaggccgcgctgttcttcagcggcaacgcgctcctgccgggcgccgagcccgccgcgcactgctactgcggccaccaattcggccagttcgccgggcagctgggcgacggcgccgccatgtacctgggcgaggtgtgcacggcgaccggcgagcgctgggagctgcagctcaagggcgccgggcccacgcccttctccagacaggccgacggtcgcaaggtcctacggtcaagcatccgggagtttctatgcagcgaagccatgttccacctgggagtccccaccacacgggccggcgcctgcgtcacgtccgagtccacggtggtgcgcgacgtgttctatgatggtaatcccaaatatgaacaatgcacggttgtgttgcgtgtagcttccactttcataaggtttggatcctttgagatttttaagtctgcagatgagcacacagggcgtgcaggccccagcgtggggaggaacgacattcgagtgcagctgctcgactatgtcatcagctccttttaccccgagatccaggctgctcatgccagcgacagcgtgcagagaaatgctgccttcttccgggaggtgacgcggcgcacggcgcggatggtggccgagtggcagtgtgtgggcttctgccacggcgtgctcaacaccgacaacatgagcatcctggggctcaccatcgactacgggccctttggcttcctggacaggtacgaccccgaccacgtgtgcaatgcctccgacaacaccggccgctacgcgtacagcaagcagcccgaggtgtgcaggtggaacctgcggaagctggccgaggccctgcagccggaactgcccctggagctgggggaggccatcctggccgaggagtttgacgccgagttccaaaggcactacctgcagaagatgcgcaggaagctgggcctcgtgcaggtggagctggaggaagacggggcgctggtgtccaagctcctggagaccatgcatctgaccggtgccgacttcacaaacaccttctacttgctgagctccttcccagtggagctagagtcgccaggcctggcggaattcctggccaggctgatggagcagtgtgcctccctggaggagctgaggctggccttccggccccagatggatccccggcagctatccatgatgctgatgctggcgcagtcaaacccgcagctgttcgcgcttatgggcacccgggcaggcatcgccagggagctggagcgtgtggagcagcagtctcggctggagcagctgagtgcggcagagctgcagagcaggaaccagggccactgggctgactggctacaggcgtacagagcccggctggacaaggacctggaaggcgctggggacgctgccgcctggcaggctgagcacgtgcgcgtgatgcacgccaacaacccgaagtacgtgctgaggaactacatcgcgcagaatgccatcgaggctgccgagcgcggggacttctcagaggtgcggcgggtgctgaaactactggagaccccttaccactgcgaggcgggggccgccacagacgccgaggccacggaagccgacggggcggacggcaggcagcgctcctacagcagtaagcccccgctctgggcagcagaactgtgcgtgacatgatcttcgtaacggcctcggcacgctccacacccctggagtctcccgaggcccccatgtgctgctgagtggccaagatgatgccaggctgccctatacactgggggattctgccctggcccatgcacacccgtctttccatgatggcagagacatccagtcaggacctgacccgtctctgtctgaggccggctcagcagtgcagcctggtccctgggggctggacccaggctcctaaataaaccagcaactccctcgaaaaaaaaaaaaa

SEQ ID NO: 344 - DNA, 2909 bp, Homo Sapiens
gcactgagccggctcaggcagagacgcggcaccatggctagcaagaaagtctgcattgtaggctccgggaactggggctcagccatcgccaagatcgtgggtggcaatgcagcccagctggcacagtttgacccacgggtgaccatgtgggtatttgaggaagacattggaggcaaaaagctgactgagatcatcaacacgcagcatgagaatgtcaaatacctgccagggcacaagttgcccccaaatgtggtggctgtcccagatgtggtccaggctgcagaggatgctgacatcctgatctttgtggtgccccatcagttcatcggcaagatctgtgaccagctcaagggccatctgaaggcaaacgccactggcatatctcttattaagggggtagacgagggccccaatgggctgaagctcatctcggaagtgattggggagcgcctcggcatccccatgagtgtgctgatgggggccaacattgccagcgaggtggctgatgagaagttctgtgagacaaccattggctgcaaggacccggcccagggacaactcctgaaagagctgatgcagacaccaaacttccgtatcacagtggtgcaagaggtggacacagtagagatctgtggagccttaaagaatgtagtggccgtgggggctggcttctgtgatggcctgggctttggcgacaacaccaaggcggcagtgatccggctgggactcatggagatgatagccttcgccaagctcttctgcagtggccctgtgtcctctgccaccttcttggagagctgtggtgttgctgacctgatcactacctgctatggagggcggaaccggaaagtggctgaggcctttgcgcgtacaggaaagtccattgagcagctggagaaagagttgctgaatgggcagaaactgcaggggcccgagacagcccgggagctatacagcatcctccagcacaagggcctggtagacaagtttcccttgttcatggctgtgtacaaggtgtgctacgagggccagccagtgggtgaattcatccactgcctgcagaatcatccagaacatatgtgagtggggccagggcccaggccaggccgcttttttaccccagcggagaccagcagaagcctggggtacctagtcaccaggatctccaggactcccagggagcagagtcttctcatcttttcactggaggacaggaggctatggggcccagctacgcacctggagatcctgaactgtcaagccactggcagcctcatgccaccacatttgccagaaatgcagttgccctgtccctctccagatgtggggctttctccatatcctctgggaggggtggaatcaagccccagtgctgcctgcttggtggcgggggtgatgtatgtggagaagggttgggggagaggccggtagggcaggggctgctagtggctgtctcacatacaccagtaatcctgttaaagggctgaagaagtatcttagccacaggagcgatgaggcaaggattgtcagggaggggtctgggcttctgagctgatgcaggccccaaggacccctttgctgacctctgccaggacccacacagcttcgatggatctcagtgtttgttaacaaaatacaaagatctcaaacaaaccccttttagcttctcctagcaacatctgtgtcctcagaaacctctggttctcccccttccccctcccccaggctgccctggcacccaaattgctgccatgctggcatctgtagctcggtggcttgacattctccccagggacttcccggttcctagttctttgccagctcctccccactctgtgcgacctttccaagccttccctcaccctccccgccagcaccctctttggggagcaggaacttaatctgctgacagagctacacctttcataacaggctcagatcactcagctccctgtgacctttgtattcacccaggcttccttctcagtagctctagctgggggaggtgtcagctgggcccctcctgtgctatctccccagaggacatccctgactccacccctttcttcctcccaaactctgcacctcttcctcagctgctccagaccggccagggtaaccagctaaccatgcctggcatctggaagccagcaggccagagggtggcccaaaggctgatgaacggtagggaagggtgagcagattcctatgttggtgggcaccaatattccaagggcagctctctttgctgaatgagggccttctcgtgaggtactgacaacaccagcaactcgagagctgggaaactcaaggaggaggaagaaaatcaaaaccaccctactccctggggtgaggaaagaacaggaggggaggaggaggagtgtgctctgcacttgccttgctccagcatggggtggcagcagaggaatgtcacaggtcagcagcctaggcctccagctataaatagtccggagggcccgagaggctcccgcccgtccagcagggctgtcagcttcctgtgtggcagcacctggcacactggctctggccagcattatgctaaaaccctgttactctccaatgaaccagggaggcgggctcctctctgcgcctatcccttgagaattctgtcttaccagtgaagggtggggctgcccagatcaggcagcaggagtgaggggcacagtcaccccaggccttgctgagcccaggtctgggtactgagtgtccagagctgcctccccaggaggttaaggtgggggcaaaggggaagcttcaagcactttgcctacttttgttcactccccagtgcactgtgactcaggccttcccatcaggcctatttgtctacccaataaagcgtgttttttccagaaaaaaaaaaaaaaaaaaaaaaaaaaaaaaaaaaa

SEQ ID NO: 345 - DNA, 1229 bp, Homo Sapiens
gtctgacgggcgatggcgcagccaatagacaggagcgctatccgcggtttctgattggctactttgttcgcattataaaaggcacgcgcgggcgcgaggcccttctctcgccaggcgtcctcgtggaagtgacatcgtctttaaaccctgcgtggcaatccctgacgcaccgccgtgatgcccagggaagacagggcgacctggaagtccaactacttccttaagatcatccaactattggatgattatccgaaatgtttcattgtgggagcagacaatgtgggctccaagcagatgcagcagatccgcatgtcccttcgcgggaaggctgtggtgctgatgggcaagaacaccatgatgcgcaaggccatccgagggcacctggaaaacaacccagctctggagaaactgctgcctcatatccgggggaatgtgggctttgtgttcaccaaggaggacctcactgagatcagggacatgttgctggccaataaggtgccagctgctgcccgtgctggtgccattgccccatgtgaagtcactgtgccagcccagaacactggtctcgggcccgagaagacctcctttttccaggctttaggtatcaccactaaaatctccaggggcaccattgaaatcctgagtgatgtgcagctgatcaagactggagacaaagtgggagccagcgaagccacgctgctgaacatgctcaacatctcccccttctcctttgggctggtcatccagcaggtgttcgacaatggcagcatctacaaccctgaagtgcttgatatcacagaggaaactctgcattctcgcttcctggagggtgtccgcaatgttgccagtgtctgtctgcagattggctacccaactgttgcatcagtaccccattctatcatcaacgggtacaaacgagtcctggccttgtctgtggagacggattacaccttcccacttgctgaaaaggtcaaggccttcttggctgatccatctgcctttgtggctgctgcccctgtggctgctgccaccacagctgctcctgctgctgctgcagccccagctaaggttgaagccaaggaagagtcggaggagtcggacgaggatatgggatttggtctctttgactaatcaccaaaaagcaaccaacttagccagttttatttgcaaaacaaggaaataaaggcttacttctttaaaaagtaaaaaaaaaaaaaaaaaaaaaaaaa

SEQ ID NO: 346 - DNA, 8694 bp, Homo Sapiens
tgaggaatcaacagccgccatcttgtcgcggacccgaccggggcttcgagcgcgatctactcggccccgccggtcccgggccccacaaccgcccgcgctcgctcctctccctcgcagccggcagggcccccgacccccgtccgggccctcgccggcccggccgcccgtgcccggggctgttttcgcgagcaggtgaaaatggctgagaacttgctggacggaccgcccaaccccaaaagagccaaactcagctcgcccggtttctcggcgaatgacagcacagattttggatcattgtttgacttggaaaatgatcttcctgatgagctgatacccaatggaggagaattaggccttttaaacagtgggaaccttgttccagatgctgcttccaaacataaacaactgtcggagcttctacgaggaggcagcggctctagtatcaacccaggaataggaaatgtgagcgccagcagccccgtgcagcagggcctgggtggccaggctcaagggcagccgaacagtgctaacatggccagcctcagtgccatgggcaagagccctctgagccagggagattcttcagcccccagcctgcctaaacaggcagccagcacctctgggcccacccccgctgcctcccaagcactgaatccgcaagcacaaaagcaagtggggctggcgactagcagccctgccacgtcacagactggacctggtatctgcatgaatgctaactttaaccagacccacccaggcctcctcaatagtaactctggccatagcttaattaatcaggcttcacaagggcaggcgcaagtcatgaatggatctcttggggctgctggcagaggaaggggagctggaatgccgtaccctactccagccatgcagggcgcctcgagcagcgtgctggctgagaccctaacgcaggtttccccgcaaatgactggtcacgcgggactgaacaccgcacaggcaggaggcatggccaagatgggaataactgggaacacaagtccatttggacagccctttagtcaagctggagggcagccaatgggagccactggagtgaacccccagttagccagcaaacagagcatggtcaacagtttgcccaccttccctacagatatcaagaatacttcagtcaccaacgtgccaaatatgtctcagatgcaaacatcagtgggaattgtacccacacaagcaattgcaacaggccccactgcagatcctgaaaaacgcaaactgatacagcagcagctggttctactgcttcatgctcataagtgtcagagacgagagcaagcaaacggagaggttcgggcctgctcgctcccgcattgtcgaaccatgaaaaacgttttgaatcacatgacgcattgtcaggctgggaaagcctgccaagttgcccattgtgcatcttcacgacaaatcatctctcattggaagaactgcacacgacatgactgtcctgtttgcctccctttgaaaaatgccagtgacaagcgaaaccaacaaaccatcctggggtctccagctagtggaattcaaaacacaattggttctgttggcacagggcaacagaatgccacttctttaagtaacccaaatcccatagaccccagctccatgcagcgagcctatgctgctctcggactcccctacatgaaccagccccagacgcagctgcagcctcaggttcctggccagcaaccagcacagcctcaaacccaccagcagatgaggactctcaaccccctgggaaataatccaatgaacattccagcaggaggaataacaacagatcagcagcccccaaacttgatttcagaatcagctcttccgacttccctgggggccacaaacccactgatgaacgatggctccaactctggtaacattggaaccctcagcactataccaacagcagctcctccttctagcaccggtgtaaggaaaggctggcacgaacatgtcactcaggacctgcggagccatctagtgcataaactcgtccaagccatcttcccaacacctgatcccgcagctctaaaggatcgccgcatggaaaacctggtagcctatgctaagaaagtggaaggggacatgtacgagtctgccaacagcagggatgaatattatcacttattagcagagaaaatctacaagatacaaaaagaactagaagaaaaacggaggtcgcgtttacataaacaaggcatcttggggaaccagccagccttaccagccccgggggctcagccccctgtgattccacaggcacaacctgtgagacctccaaatggacccctgtccctgccagtgaatcgcatgcaagtttctcaagggatgaattcatttaaccccatgtccttggggaacgtccagttgccacaagcacccatgggacctcgtgcagcctccccaatgaaccactctgtccagatgaacagcatgggctcagtgccagggatggccatttctccttcccgaatgcctcagcctccgaacatgatgggtgcacacaccaacaacatgatggcccaggcgcccgctcagagccagtttctgccacagaaccagttcccgtcatccagcggggcgatgagtgtgggcatggggcagccgccagcccaaacaggcgtgtcacagggacaggtgcctggtgctgctcttcctaaccctctcaacatgctggggcctcaggccagccagctaccttgccctccagtgacacagtcaccactgcacccaacaccgcctcctgcttccacggctgctggcatgccatctctccagcacacgacaccacctgggatgactcctccccagccagcagctcccactcagccatcaactcctgtgtcgtcttccgggcagactcccaccccgactcctggctcagtgcccagtgctacccaaacccagagcacccctacagtccaggcagcagcccaggcccaggtgaccccgcagcctcaaaccccagttcagcccccgtctgtggctacccctcagtcatcgcagcaacagccgacgcctgtgcacgcccagcctcctggcacaccgctttcccaggcagcagccagcattgataacagagtccctaccccctcctcggtggccagcgcagaaaccaattcccagcagccaggacctgacgtacctgtgctggaaatgaagacggagacccaagcagaggacactgagcccgatcctggtgaatccaaaggggagcccaggtctgagatgatggaggaggatttgcaaggagcttcccaagttaaagaagaaacagacatagcagagcagaaatcagaaccaatggaagtggatgaaaagaaacctgaagtgaaagtagaagttaaagaggaagaagagagtagcagtaacggcacagcctctcagtcaacatctccttcgcagccgcgcaaaaaaatctttaaaccagaggagttacgccaggccctcatgccaaccctagaagcactgtatcgacaggacccagagtcattacctttccggcagcctgtagatccccagctcctcggaattccagactattttgacatcgtaaagaatcccatggacctctccaccatcaagcggaagctggacacagggcaataccaagagccctggcagtacgtggacgacgtctggctcatgttcaacaatgcctggctctataatcgcaagacatcccgagtctataagttttgcagtaagcttgcagaggtctttgagcaggaaattgaccctgtcatgcagtcccttggatattgctgtggacgcaagtatgagttttccccacagactttgtgctgctatgggaagcagctgtgtaccattcctcgcgatgctgcctactacagctatcagaataggtatcatttctgtgagaagtgtttcacagagatccagggcgagaatgtgaccctgggtgacgacccttcacagccccagacgacaatttcaaaggatcagtttgaaaagaagaaaaatgataccttagaccccgaacctttcgttgattgcaaggagtgtggccggaagatgcatcagatttgcgttctgcactatgacatcatttggccttcaggttttgtgtgcgacaactgcttgaagaaaactggcagacctcgaaaagaaaacaaattcagtgctaagaggctgcagaccacaagactgggaaaccacttggaagaccgagtgaacaaatttttgcggcgccagaatcaccctgaagccggggaggtttttgtccgagtggtggccagctcagacaagacggtggaggtcaagcccgggatgaagtcacggtttgtggattctggggaaatgtctgaatctttcccatatcgaaccaaagctctgtttgcttttgaggaaattgacggcgtggatgtctgcttttttggaatgcacgtccaagaatacggctctgattgcccccctccaaacacgaggcgtgtgtacatttcttatctggatagtattcatttcttccggccacgttgcctccgcacagccgtttaccatgagatccttattggatatttagagtatgtgaagaaattagggtatgtgacagggcacatctgggcctgtcctccaagtgaaggagatgattacatcttccattgccacccacctgatcaaaaaatacccaagccaaaacgactgcaggagtggtacaaaaagatgctggacaaggcgtttgcagagcggatcatccatgactacaaggatattttcaaacaagcaactgaagacaggctcaccagtgccaaggaactgccctattttgaaggtgatttctggcccaatgtgttagaagagagcattaaggaactagaacaagaagaagaggagaggaaaaaggaagagagcactgcagccagtgaaaccactgagggcagtcagggcgacagcaagaatgccaagaagaagaacaacaagaaaaccaacaagaacaaaagcagcatcagccgcgccaacaagaagaagcccagcatgcccaacgtgtccaatgacctgtcccagaagctgtatgccaccatggagaagcacaaggaggtcttcttcgtgatccacctgcacgctgggcctgtcatcaacaccctgccccccatcgtcgaccccgaccccctgctcagctgtgacctcatggatgggcgcgacgccttcctcaccctcgccagagacaagcactgggagttctcctccttgcgccgctccaagtggtccacgctctgcatgctggtggagctgcacacccagggccaggaccgctttgtctacacctgcaacgagtgcaagcaccacgtggagacgcgctggcactgcactgtgtgcgaggactacgacctctgcatcaactgctataacacgaagagccatgcccataagatggtgaagtgggggctgggcctggatgacgagggcagcagccagggcgagccacagtcaaagagcccccaggagtcacgccgggtgagcatccagcgctgcatccagtcgctggtgcacgcgtgccagtgccgcaacgccaactgctcgctgccatcctgccagaagatgaagcgggtggtgcagcacaccaagggctgcaaacgcaagaccaacgggggctgcccggtgtgcaagcagctcatcgccctctgctgctaccacgccaagcactgccaagaaaacaaatgccccgtgcccttctgcctcaacatcaaacacaagctccgccagcagcagatccagcaccgcctgcagcaggcccagctcatgcgccggcggatggccaccatgaacacccgcaacgtgcctcagcagagtctgccttctcctacctcagcaccgcccgggacccccacacagcagcccagcacaccccagacgccgcagccccctgcccagccccaaccctcacccgtgagcatgtcaccagctggcttccccagcgtggcccggactcagccccccaccacggtgtccacagggaagcctaccagccaggtgccggcccccccacccccggcccagccccctcctgcagcggtggaagcggctcggcagatcgagcgtgaggcccagcagcagcagcacctgtaccgggtgaacatcaacaacagcatgcccccaggacgcacgggcatggggaccccggggagccagatggcccccgtgagcctgaatgtgccccgacccaaccaggtgagcgggcccgtcatgcccagcatgcctcccgggcagtggcagcaggcgccccttccccagcagcagcccatgccaggcttgcccaggcctgtgatatccatgcaggcccaggcggccgtggctgggccccggatgcccagcgtgcagccacccaggagcatctcacccagcgctctgcaagacctgctgcggaccctgaagtcgcccagctcccctcagcagcaacagcaggtgctgaacattctcaaatcaaacccgcagctaatggcagctttcatcaaacagcgcacagccaagtacgtggccaatcagcccggcatgcagccccagcctggcctccagtcccagcccggcatgcaaccccagcctggcatgcaccagcagcccagcctgcagaacctgaatgccatgcaggctggcgtgccgcggcccggtgtgcctccacagcagcaggcgatgggaggcctgaacccccagggccaggccttgaacatcatgaacccaggacacaaccccaacatggcgagtatgaatccacagtaccgagaaatgttacggaggcagctgctgcagcagcagcagcaacagcagcagcaacaacagcagcaacagcagcagcagcaagggagtgccggcatggctgggggcatggcggggcacggccagttccagcagcctcaaggacccggaggctacccaccggccatgcagcagcagcagcgcatgcagcagcatctccccctccagggcagctccatgggccagatggcggctcagatgggacagcttggccagatggggcagccggggctgggggcagacagcacccccaacatccagcaagccctgcagcagcggattctgcagcaacagcagatgaagcagcagattgggtccccaggccagccgaaccccatgagcccccagcaacacatgctctcaggacagccacaggcctcgcatctccctggccagcagatcgccacgtcccttagtaaccaggtgcggtctccagcccctgtccagtctccacggccccagtcccagcctccacattccagcccgtcaccacggatacagccccagccttcgccacaccacgtctcaccccagactggttccccccaccccggactcgcagtcaccatggccagctccatagatcagggacacttggggaaccccgaacagagtgcaatgctcccccagctgaacacccccagcaggagtgcgctgtccagcgaactgtccctggtcggggacaccacgggggacacgctagagaagtttgtggagggcttgtagcattgtgagagcatcaccttttccctttcatgttcttggaccttttgtactgaaaatccaggcatctaggttctttttattcctagatggaactgcgacttccgagccatggaagggtggattgatgtttaaagaaacaatacaaagaatatatttttttgttaaaaaccagttgatttaaatatctggtctctctctttggtttttttttggcgggggggtggggggggttcttttttttccgttttgtttttgtttggggggaggggggttttgtttggattctttttgtcgtcattgctggtgactcatgcctttttttaacgggaaaaacaagttcattatattcatattttttatttgtattttcaagactttaaacatttatgtttaaaagtaagaagaaaaataatattcagaactgattcctgaaataatgcaagcttataatgtatcccgataactttgtgatgtttcgggaagatttttttctatagtgaactctgtgggcgtctcccagtattaccctggatgataggaattgactccggcgtgcacacacgtacacacccacacacatctatctatacataatggctgaagccaaacttgtcttgcagatgtagaaattgttgctttgtttctctgataaaactggttttagacaaaaaatagggatgatcactcttagaccatgctaatgttactagagaagaagccttcttttctttcttctatgtgaaacttgaaatgaggaaaagcaattctagtgtaaatcatgcaagcgctctaattcctataaatacgaaactcgagaagattcaatcactgtatagaatggtaaaataccaactcatttcttatatcatattgttaaataaactgtgtgcaacagacaaaaagggtggtccttcttgaattcatgtacatggtattaacacttagtgttcggggttttttgttatgaaaatgctgttttcaacattgtatttggactatgcatgtgttttttccccattgtatataaagtaccgcttaaaattgatataaattactgaggtttttaacatgtattctgttctttaagatcccctgtaagaatgtttaaggtttttatttatttatatatattttttggtctgttctttgtaaaaaaaaaaaaaaaaa

SEQ ID NO: 347 - DNA, 1977 bp, Homo Sapiens
ggggtgatcatggacgcttgacaacctgcgggcaggcgccgggaggccgagccagcgactaagaggaccgagaggtggcgtggacagatttcaaggccagagaatggcaggggaacagaaaccctcaagtaatctcctggagcagtttattttactagccaaaggtaccagtggctcagccctcactgctctcataagccaggtcttagaggctcccggagtgtatgtctttggagaacttctggagctggccaacgtgcaggagcttgcggaaggagctaatgctgcttatttgcagttgttgaacctgtttgcctatgggacatacccagattacatagccaacaaggagagcctgccagaactgagcacagctcagcagaacaagctgaagcatcttaccatcgtgagcttggcatcaagaatgaagtgtatcccctactccgtgttgctgaaagacctggagatgcggaatctccgggaactagaagaccttatcattgaggctgtctacactgacatcatccagggcaagctggaccagcgaaaccagctgctggaagtggatttctgcattggccgtgacatccgaaagaaggatatcaataatattgtcaagaccctgcatgaatggtgtgatggctgtgaagcagttctactgggcatcgagcagcaagttctgagagccaaccagtacaaagagaaccacaaccgaactcagcagcaggtagaagcagaggttaccaacatcaagaagacactcaaagccaccgcatcctcctcggctcaggagatggagcagcagctggctgaacgggagtgtccccctcacgctgagcagaggcagcccaccaagaagatgtccaaagtgaaaggtctggtctccagccgccactagggccggctggggcagctggcactcaccaggcctgggtcaggtggggaggggacaccaagggcccatttcctcccctctctacctgcagtgagttccagacctgcccgtcccctcaccagcgcctccccaccctgttggtactgttccagaaaaactgttactccccctcacccactccctccttccccagttgttcccttcagactcaggggctccaccaatgccatcccaaaacagggtcagacactgctcagcttccctccaggaggttcttgtctctgtgtaagggcttgtctccctcccagtttttcttttgctccacgtcattttgtcaggctggttataagccggaggcagctttaaccagcccccagggatgattgtgaaggaggcccctccccttgtgaggagggggcactcctctccagcccctggtaccacagtcctcacgatggtgcagtgatttctagccaggcgtcaagatgcgctgctttccctctcctgcctcattccttgttggcagctccagttcaggccgtggagggacgtgatgctgggctgtgtttactaaacccacgggttttcagcctcttaagcccagctccgatctccaattagttgagagcgctgggttgactaacctctggtatctgagcacagacagagggtgctgtgggtctgctgggtggcagaaatggttccttccggcttggcgttctctcctggccactcttcctgctgcctctgactactcagccttgttttcggtgtgtaggccccagctgcccactggaactgccggctaatgcttgctctcccaagatctttaactcctcctggctgcacctgggtagggatggtggcatcgatgcccctctgtctgctgaaggacctgttgctgcttctgtcttttcacccctccttggctgatgacccagagccctctgatgatggcattctcctggcaagagaaaaagacttaactagacttctgaacttgaacagtttcaggttatattttaatttttttttttttgtacaggttctgattctaatacatttcaacatgcttttgtccc

SEQ ID NO: 348 - DNA, 942 bp, Homo Sapiens
gagcgctctggagggcgtggccgtgggaaaggaggcgcggaaagccgacgcgcgtccattggtcggctggacgaggggaggagccgctggctcccagccccgccgcgatgagcctcggccgcctttgccgcctactgaagccggcgctgctctgtggggctctggccgcgcctggcctggccgggaccatgtgcgcgtcccgggacgactggcgctgtgcgcgctccatgcacgagttttccgccaaggacatcgacgggcacatggttaacctggacaagtaccggggcttcgtgtgcatcgtcaccaacgtggcctcccagtgaggcaagaccgaagtaaactacactcagctcgtcgacctgcacgcccgatacgctgagtgtggtttgcggatcctggccttcccgtgtaaccagttcgggaagcaggagccagggagtaacgaagagatcaaagagttcgccgcgggctacaacgtcaaattcgatatgttcagcaagatctgcgtgaacggggacgacgcccacccgctgtggaagtggatgaagatccaacccaagggcaagggcatcctgggaaatgccatcaagtggaacttcaccaagttcctcatcgacaagaacggctgcgtggtgaagcgctacggacccatggaggagcccctggtgatagagaaggacctgccccactatttctagctccacaagtgtgtggccccgcccgagcccctgcccacgcccttggagccttccaccggcactcatgacggcctgcctgcaaacctgctggtggggcagacccgaaaatccagcgtgcaccccgccggaggaaggtcccatggcctgctgggcttggctcggcgcccccacccctggctaccttgtgggaataaacagacaaattagcctgctggaaaaaaaaaaaaaaaaaaaaaaaaaa

SEQ ID NO: 349 - DNA, 2360 bp, Homo Sapiens
cgcgttcgcggacggctgtggtgttttggcgcatgggcggagccgtagttacggtcgactggggcgtcgtccctagcccgggagccgggtctctggagtcgcggcccggggttcacgatgtccgacgaggaagcgaggcagagcggaggctcctcgcaggccggcgtcgtgactgtcagcgacgtccaggagctgatgcggcgcaaggaggagatagaagcgcagatcaaggccaactatgacgtgctggaaagccaaaaaggcattgggatgaacgagccgctggtggactgtgagggctacccccggtcagacgtggacctgtaccaagtccgcaccgccaggcacaacatcatatgcctgcagaatgatcacaaggcagtgatgaagcaggtggaggaggccctgcaccagctgcacgctcgcgacaaggagaagcaggcccgggacatggctgaggcccacaaagaggccatgagccgcaaactgggtcagagtgagagccagggccctccacgggccttcgccaaagtgaacagcatcagccccggctccccagccagcatcgcgggtctgcaagtggatgatgagattgtggagttcggctctgtgaacacccagaacttccagtcactgcataacattggcagtgtggtgcagcacagtgaggggaagcccctgaatgtgacagtgatccgcaggggggaaaaacaccagcttagacttgttccaacacgctgggcaggaaaaggactgctgggctgcaacattattcctctgcaaagatgattgtccctggggaacagtaacaggaaagcatcttcccttgccctggacttgggtctagggatttccaacttgtcttctctccctgaagcataaggatctggaagaggcttgtaacctgaacttctgtgtggtggcagtactgtggcccaccagtgtaatctccctggattaaggcattcttaaaaacttaggcttggcctctttcacaaattaggccacggccctaaataggaattccctggattgtgggcaagtgggcggaagttattctggcaggtactggtgtgattattattattatttttaataaagagttttacagtgctgatatgaccctgttgtcaccccagctgaatttcttatgaccctcccaaaccaaagctcagatggggtcagaagagcttcatagaaagttgggcaaaacaggctagcaattgcaaagtcaggctttgaccaacatatttctttgcactgaggccttgctgctgtggatacggaaatggttaagtactgtgcttcctcagcagctgggctgtcagggccatagtagctccctttggagaacagggaaagcctggaggcttcccaggtggcccagcgtggtgtcctgtcagcttcctctttaggaacccaccagagggcagcaagctcctttcacttcgctagtaagaacccctccgtttttgtgtgtttttgtttttgttttctggagacaaggtcttgctttgtcacccaggctggagtgcagtgtcgtgatcaaggttcactgaagccttgacgctgtgggcactgcctcagccgcccaagtatctgggaccacaggcgtgcaccaccatgcatagctaatttattttttgtagagacagggtctccctgtgttgaccaggttggtctcgaactcctgggctcaagcagtcctcctgccttggcctcctaaagtgctgggatcacaggcgtgagccactgcgcccagcccactgctagtttgactttttataattgaacctcctggctatgccctgagatcagcgctattttgtaaaccgctgaggtatggataggaacgagtagatcagacctcttgaaaatgcttattcttcctcccttttattttttgtctcttttaagatggtaaaatggttctcagggattcctgccaatactttgaattattttttcctctccatggtatcagtgttcatttccccagttcttgcacaccgctttctgttttggcagttctgccaggcaagccctgtgttccttgggactggttttgctgtggttggatacagataccagcttgccttgatgggattggtattgctgtgtgcttccagccacaggttctcacactcaattccaaagccttcctattgggcgaattccctcaaactctatttgacctgacagccatacgtattcccctctggtagccacagacatgctgtgtttaccaatgtttgctgtttaaattgcatgttctaattccacgtattttccagtctcttttataaagtctcagactataataaacacagcttgcccagtttaaaaaaaaaaaaaaaaaa

SEQ ID NO: 350 - DNA, 3320 bp, Homo Sapiens
gcgggccggggcggggcctcgcttcccaggcaagcgcaggtccaggcggtgcagcttgggcggcccagcggatcgtgccgcggcggccgagcgcaggcaggagatcatgtcctctgagatcttgagaaggtggctggagccctttggacctccgcgggaggcagtgataattagcctcctcctcccatcatgttctgaggatgggagagaggatggtgacggcaccggaggcctggggtgctctgcccggctgcgcattatatccccattaaagactggcctactgaaaaaggctggccctggaatcaaagaagatccgggcttcttccccctctgcccttatttttgaccttgggcagtgccttccacctctattgtgagaggccagagaaaaaaatcagagctcaccttttattaaagtacctgatgtgtcccaagctccttggaccgccccagtgacccctggagctacaggagggtgtccagaagccacaagccatggctgtggggaacatcaacgagctgcccgagaacatcctgctggagctgttcacgcacgtgcccgcccgccagctgctgctgaactgccgcctggtctgcagcctctggcgggacctcatcgacctcgtgaccctctggaaacgcaagtgcctgcgagagggcttcatcactgaggactgggaccagcccgtggccgactggaagatcttctacttcttacggagcctgcacaggaacctcctgcacaacccgtgcgctgaagaggggttcgagttctggagcctggatgtgaatggaggcgatgagtggaaggtggaggatctctctcgagaccagaggaaggaattccccaatgaccaggtcaagaaatacttcgttacttcatattacacctgcctcaagtcccaggtggtggacctcaaggccgaagggtattgggaggagctgatggataccacacggccggacatcgaggtcaaggactggttcgcagccaggccagattgcgggtccaagtaccagctgtgcgttcagctcctgtcgtccgcgcacgcgcctctggggaccttccagccagacccggcgaccatccagcagaagagcgatgccaagtggagggaggtctcccacacattctccaactacccgcccggcgtccgctacatctggtttcagcacggcggcgtggacactcattactgggccggctggtacggcccgagggtcaccaacagcagcatcaccatcgggcccccgctgccctgacaccccctgagcccccatctgctgaaccctgactggtaaacaactgctgtcagaaaagggctgggcttgggaaggggaggtggaggccaggtgtccccagacctctaacccttgcccctagcagcctcttctttgtggagcctctcagtgtgggcagccctcgcatgctggggtcgggccagctctccccgaaaggtcttgacctgaatgatggccggggaagcctgcgtgtgcccctttcagagacggagcacctgagatgtgggaggtgcagcatgttcccctgggcccctcagaaagtcgagcttggaggccagcctggatctgtctctcccttcccctcctgggaccattctacctgtgttctttgaccctcggagcagggacaggcaagacaactggcaagcttgcagctgccctgatggtgcaggtgcagggaggtgaccatgtaactctgaccaatctgggaagtggagggtgggctcatgggccgtgctctgcccctgtctgctgctcccagtctctcgctctgcctgcctgctcagaagaggtggctttggcccagaggctcaggccgggactgagatggacagacccagggtggggtggggtccaggtcgggtgtggactgtcctcactgtcagtggagccccagaagctagatgggtaccaggtggggttaggttcccagaggactgagggaatcctgtacaggatgtcccagggtagatggggagcaggattgggacctgctctgacagctggacacatgagccctggatgagtatggtagggggtttgaagaatcccctgtccacctcccaaatccaggcccggccccctctggcttggagagcattccaagcccccaccccacccctagaactgccattcccaagacctctgtctcccagccaaccacccttggaacttgcctcttgtcctgctggaaagatagcagtgttctcctgacttcgccctactgcatgcagccaaataaaaggtgtgcccagtctaacctgtgccctgtggtttctggaaggaaaggcagactttaggtggtcctgcctggacctgcagatggtacaatggcatggcttctgtctaaggtacagaggggttggcatttcaggaaccaggccatcacagaaacaggttcatgggcagacccctcagtgagctgcaggtatctcacctggcagccgtccagtactgctggcttcctctggaggcccagccacaggctggggttggggtgtgtggacatctctgggcagctcttgagtccaccttgtgccagatcagcagtgccacccaggctctgcctcctggtgttactctttgccaacagctttacggacattggatgaagccgaagcatttagaatggtgcctggcacacagttggtgcgtgatatggttaagctttgtgtccccacccacatctcatcttgaatggtaatcctgggtgtttagggagagacctggtgggaagtgattggattatgggagcggttttcccccatgctgttctcatgatagtgagtgagttctcacgagatctgatggttttacaagtgacggtttccccggctccctcctgccgccatgtgaagaaggtcgttgcttccccttcaccttccaccaccatgattgtaagttccttttttcttttcttttcttttttttttttttttttttgagatggagtctcgctctgtcgcccaggctggagtgcagtggcgcaatctcagctcactgcaagctctgcctcccaggttcgcgccattcacctgcctcagcctctggagtagctgagactacaggcgcccaccaccatgcccggctaattttgtttgtatttttagtagagatggagtttcaccatgttggccagggtggtctcaatctcctgacctcgtgatccacccacctcgacctcccaaagtgctgagattacaggcgtgagccaccgcgcccagcgattgtttcttgaggcttccccagccatatggaactataagtcaattaaacctctttccttttataaatca

SEQ ID NO: 351 - DNA, 1548 bp, Homo Sapiens
ggcaagggaaaaccggctgtggagaaggaaatagggcccggcgctgagtgagcgtggttgcgtgtcctttgcagacactttctggggcgaggtgacatggcgagagtcttggatcggtggacgtagacggtagacagttcgcgtgcgtttccttcgcctacttggcctacatgccttctgcccgtgaagcgatgtttcccctcgaaaggccgtagacgccgtcagaatcggtttttcagtgagttttgacccctccgacgctccgtctctgacagaatcgcggcgttcttcgtacccgcccatcctccgcggacgccgtgccatggcgactctgctgcgccctgtcctccgtcggctctgcgggctcccgggcctacagcggcctgcggcagaaatgcccctccgggctaggagcgacggcgccggcccgctatactcgcaccacctccccacctccccgctgcagaaagcgctgttggccgccggctccgcggcgatggcgctctataacccctaccgccacgacatggtcgcagttctaggggagaccacaggacaccgcaccctgaaggtcctcagggaccagatgaggagggatccagagggtgcccagatcctgcaggagcgtccccggatttcgacatccaccctcgacctgggcaagctccagagcctgccggaaggctccctcggtcgcgagtatctccgtttcctggatgtgaacagggtctccccagacacccgagcacccacccgcttcgtggatgatgaggagctagcgtatgtaattcagcggtaccgggaggtgcacgacatgcttcacaccctgctggggatgcccaccaacatcctgggggagatcgtggtgaaatggtttgaggctgtccagactggcctgcccatgtgcatcctgggtgcattctttggaccgatccgacttggcgctcagagcctgcaagtgctggtctcggagttgatcccatgggccgttcagaacgggcgcagagcccattgtgtcctcaacctgtactatgagcggcgctgggagcagtccctgagggctctgcgggaggagctgggcattacagcaccacccatgcacgtccagggcttggcctgagctcctgagccagcggggcctggcctacctcccccatcccctgcttcccttggaggcagagggctcccttgactacctttgttcctcttctttgaacactgacccttggacaacatttatcataatttgtcataaccactgctgagtggccttgaggacgaaccccgcagggagcaagcagtacagtggcattcccagggggaccagcagctacccaaggagaaccatgcatgaacagtatcagtcgtctgggctcatgctgggattgtgcagtgctcctgttgcaactcctcccagccagccaggtttgctgggggccaggctgggtgtcctcacaggagtgagggctacacccaattccaaaagcctgagaagagagaagtggagggggaggcgagtgtgtgaataaaggctcccatcaggtcaaa

SEQ ID NO: 352 - DNA, 4540 bp, Homo Sapiens
attctggggttcgtttagaggtttgaattttctcggagaaagacaggccggccacgaggaaaacagaaacaagccgcagcaacatctaagcccttgaaaggatcctgagagaggggggaaagggaaaacagcagccaccagcccaaccacttgtgtcttctgccccttcccacctatcttgcccaccccaccagcccacgctgcttgggacttgaaatctgtggccgaaggaccgtcactacataacttcaaaaataatcaaccaccctcccttcccaaaccacccaaattcactcatccagcgtttacttttttgaatccactcagaacttttttctgcgacccccctccctaaatggagttgggtgggggggaaatgaatactgagttggcctttattttttaaaagactttttgatccaatgaggccccctaaataattgagttttgggtcctggttggttgttttattttttttcctccaaaattttaccccctcccccctgagcccgaggtgctgacgtcgcaaaaaaattggataaaaccaccatcatgggttcgggtcccatagaccccaaagaacttctcaagggcctggacagcttccttaaccgagatggggaagtcaaaagtgtggatgggatttccaagatcttcagtttgatgaaggaagcacgaaagatggtgagtcgatgcacttacttgaacattctcctgcagacccgttcaccagaaatattggtcaaatttattgacgttggcggctacaaacttcttaacaattggctgacgtattcaaagacaaccaacaacattcccctcctccagcaaattctactgaccctgcagcatctaccgctcactgtagaccatctcaagcagaacaacacagctaaactggtgaagcagctgagcaagtcaagtgaggatgaagagctccggaaattggcctcagtccttgtcagcgactggatggctgtcatccgctctcagagcagtacccagcctgctgagaaagataagaagaaacgtaaagatgaaggaaaaagtcgaactacccttcctgagcgacctttgacagaggtgaaggctgagacccgggctgaggaggccccagagaagaagagggagaagcccaagtctcttcgcaccacagcacccagtcatgccaagttccgttccactggactagagctggagacaccatccttggtgcctgtgaagaagaatgccagcacagtggtggtttctgacaagtacaaccttaaacccatccccctcaaacgtcagagcaacgtagctgctccaggagatgccactccccctgcagagaagaaatacaagccactcaacacaacacctaatgccaccaaagagatcaaagtgaagatcatcccgccacagcctatggagggcctgggctttctggatgctcttaattcagcccctgttccaggcatcaaaattaagaagaaaaaaaaagtactgtcacctacggctgccaagccaagcccctttgaagggaaaacgagcacagaaccaagcacagccaaaccttcttccccagaaccagcaccaccttctgaggcaatggacgcagaccgtccaggcaccccggttccccctgttgaagtcccggagctcatggatacagcctctttggagccaggagctctggatgccaagccagtggagagtcctggagatcctaaccaactgacccggaaaggcaggaagaggaaaagtgtgacatggcctgaggaaggcaaactgagagaatatttctattttgaattggatgaaactgaacgagtaaatgtgaataagatcaaggactttggtgaggcggctaagcgagagatactgtcagaccgacatgcatttgagacagcgcggcgtctgagccatgataacatggaggagaaggtgccctgggtgtgcccccggcccctggttctgccctcacctcttgtcacccctggaagcaatagtcaggagcgatatatccaggctgagcgggagaagggaatccttcaggagctcttcctgaacaaggagagtcctcatgagcctgatcctgagccctacgagcccataccccctaaactcatccccctagatgaggagtgttccatggatgagactccgtatgttgagactctggaacctggggggtcaggtggctcacctgatggggcaggaggctccaagttgcctccagttctggccaatcttatgggaagcatgggtgctggaaagggcccccaaggccctggaggaggaggcattaatgtccaagagatcctcacctccatcatgggtagcccaaacagtcatccttcagaggaactactgaaacaaccagactattcggacaagatcaagcagatgctggtgccacatggactcctaggccctggcccaatagccaatggtttcccaccagggggtcctgggggccccaagggcatgcagcactttccccctggacctgggggacctatgccaggtccccatggaggccctggtgggccagtgggtccacgtcttctgggtcctccaccccctccccggggaggtgatcccttctgggatggcccgggcgaccctatgcggggtggcccaatgcgggggggtccaggaccaggtcctggaccataccatagaggccgaggtggccgaggaggaaacgaacctcctcctcctcctcctccattccgaggcgccagaggaggtcgctctggaggaggacccccaaatggacgagggggccctggtgggggcatggttggaggtggtgggcatcgtcctcacgaaggccctggtgggggcatgggcaacagcagtggacatcgtccccacgaaggccctggcggtggcatgggaagtgggcatcgcccccatgaaggccctggtggtagcatgggtgggggtggaggacatcgtccccacgaaggccctggcggtggcatcagtggtggcagtggccatcgtccccatgaaggccctggcggaggaatgggtgccggtggtggacatcgcccccacgaaggccctggcggaagcatgggtggaagtggtggacatcgtccccatgaaggccctggacacggggggccccatggccaccggcctcatgatgtccctggtcaccgaggccatgaccatcgagggccgccacctcatgagcaccgtggccatgatggtcctggccacgggggagggggccaccgagggcacgatggaggccacagccatggaggagacatgtcaaaccgccctgtctgccgacatttcatgatgaagggcaactgccgctatgagaacaactgtgccttctaccacccgggtgtcaatgggccccccctgccctagggaccatttgcctgccctgttcacacaacccctgtggactgcagcctcgctctttccaccctgttatggcttctgtgaggcccattttcccttttccccagctgatgaggagccggccccctcagttcccacttgcttgggttcctgggggttttctgatcactggtgcgcattgatgtacatattttcctccagtctggggaggagagagactggaaacgttcctggactgctgaagaggagacccagttggcttcactttttgagaagattcgccctgtaccccaaacccctttccagtattacccttaatgcttgagaacctaaagctggttatcctggcgaacacccctacccttctattgcgggtccccacatgcacacagaactctgacacaggatcagctgcacttaagaaatcatcccagctaagttcattattcctcatggggtggggagatgctgaaaggggtattgtatatcccactgcactgagagggctcaatcagctggatttgagttctggaacacacatcatccccacccctcccccagcgtgggctcaccattcttagtcctttctcaagtgggaccttcaactttctgtgaacacccagtctgcgtcctgggtctgctaggttcgatgatggcgaactcgtatctgcatccggtgcaagttttagctggcagaggtgagaccggtggtgctggtctgcctttgccaactatagccagtctggagacttgataaaatacttcagtgagaccagcttctcatcaacttgggcccggcgtgctgggcctgaaagtcacactacatgcactgcctttgggagtcagctcactccctgctcccacctggaaccttgccagcgtgaaggaggcttccaggtacttcaccctgtcaaccacctctgaatccccaccaggcgccttcctgggtggattcaacaagatgattttgccctttcccagttctctccttcactttggcatcagttgttttctatgaaaacagtggattggttgggttttgtgcagggtcttgggttagagccaaaatggatttgaggatgagtatttttttttttggttttgtatattttgtacattaataataaacagtggaaagagaagcagcttaaaaaaaaaaaaaaaaaaaaaa

SEQ ID NO: 353 - DNA, 3688 bp, Homo Sapiens
ccagcccccgcagtccgcccagaccgtaaagggggacgctgaggagccgcggacgctctccccggtgccgccgccgctgccgccgccatggctgccatgatggatcggaagtgagcattagggttaacggctgccggcgccggctcttcaagtcccggctccccggccgcctccacccggggaacgcgagcgcggcgcagctgactgctgcctctcacggccctcgcgaccacaagccctcaggtccggcgcgttccctgcaagactgagcggcggggagtggctcccggccgcggccccggctgcgagaaagatggcggacctggccgagtgcaacatcaaagtgatgtgtcgcttcagacctctcaacgagtctgaagtgaaccgcggcgacaagtacatcgccaagtttcagggagaagacacggtcgtgatcgcgtccaagccttatgcatttgatcgggtgttccagtcaagcacatctcaagagcaagtgtataatgactgtgcaaagaagattgttaaagatgtacttgaaggatataatggaacaatatttgcatatggacaaacatcctctgggaagacacacacaatggagggtaaacttcatgatccagaaggcatgggaattattccaagaatagtgcaagatatttttaattatatttactccatggatgaaaatttggaatttcatattaaggtttcatattttgaaatatatttggataagataagggacctgttagatgtttcaaagaccaacctttcagttcatgaagacaaaaaccgagttccctatgtaaaggggtgcacagagcgttttgtatgtagtccagatgaagttatggataccatagatgaaggaaaatccaacagacatgtagcagttacaaatatgaatgaacatagctctaggagtcacagtatatttcttattaatgtcaaacaagagaacacacaaacggaacaaaagctgagtggaaaactttatctggttgatttagctggtagtgaaaaggttagtaaaactggagctgaaggtgctgtgctggatgaagctaaaaacatcaacaagtcactttctgctcttggaaatgttatttctgctttggctgagggtagtacatatgttccatatcgagatagtaaaatgacaagaatccttcaagattcattaggtggcaactgtagaaccactattgtaatttgctgctctccatcatcatacaatgagtctgaaacaaaatctacactcttatttggccaaagggccaaaacaattaagaacacagtttgtgtcaatgtggagttaactgcagaacagtggaaaaagaagtatgaaaaagaaaaagaaaaaaataagatcctgcggaacactattcagtggcttgaaaatgagctcaacagatggcgtaatggggagacggtgcctattgatgaacagtttgacaaagagaaagccaacttggaagctttcacagtggataaagatattactcttaccaatgataaaccagcaaccgcaattggagttataggaaattttactgatgctgaaagaagaaagtgtgaagaagaaattgctaaattatacaaacagcttgatgacaaggatgaagaaattaaccagcaaagtcaactggtagagaaactgaagacgcaaatgttggatcaggaggagcttttggcatctaccagaagggatcaagacaatatgcaagctgagctgaatcgccttcaagcagaaaatgatgcctctaaagaagaagtgaaagaagttttacaggccctagaagaacttgctgtcaattatgatcagaagtctcaggaagttgaagacaaaactaaggaatatgaattgcttagtgatgaattgaatcagaaatcggcaactttagcgagtatagatgctgagcttcagaaacttaaggaaatgaccaaccaccagaaaaaacgagcagctgagatgatggcatctttactaaaagaccttgcagaaataggaattgctgtgggaaataatgatgtaaagcagcctgagggaactggcatgatagatgaagagttcactgttgcaagactctacattagcaaaatgaagtcagaagtaaaaaccatggtgaaacgttgcaagcagttagaaagcacacaaactgagagcaacaaaaaaatggaagaaaatgaaaaggagttagcagcatgtcagcttcgtatctctcaacatgaagccaaaatcaagtcattgactgaataccttcaaaatgtggaacaaaagaaaagacagttggaggaatctgtcgatgccctcagtgaagaactagtccagcttcgagcacaagagaaagtccatgaaatggaaaaggagcacttaaataaggttcagactgcaaatgaagttaagcaagctgttgaacagcagatccagagccatagagaaactcatcaaaaacagatcagtagtttgagagatgaagtagaagcaaaagcaaaacttattactgatcttcaagaccaaaaccagaaaatgatgttagagcaggaacgtctaagagtagaacatgagaagttgaaagccacagatcaggaaaagagcagaaaactacatgaacttacggttatgcaagatagacgagaacaagcaagacaagacttgaagggtttggaagagacagtggcaaaagaacttcagactttacacaacctgcgcaaactctttgttcaggacctggctacaagagttaaaaagagtgctgagattgattctgatgacaccggaggcagcgctgctcagaagcaaaaaatctcctttcttgaaaataatcttgaacagctcactaaagtgcacaaacagttggtacgtgataatgcagatctccgctgtgaacttcctaagttggaaaagcgacttcgagctacagctgagagagtgaaagctttggaatcagcactgaaagaagctaaagaaaatgcatctcgtgatcgcaaacgctatcagcaagaagtagatcgcataaaggaagcagtcaggtcaaagaatatggccagaagagggcattctgcacagattgctaaacctattcgtcccgggcaacatccagcagcttctccaactcacccaagtgcaattcgtggaggaggtgcatttgttcagaacagccagccagtggcagtgcgaggtggaggaggcaaacaagtgtaatcgtttatacatacccacaggtgttaaaaagtaatcgaagtacgaagaggacatggtatcaagcagtcattcaatgactataacctctactcccttgggattgtagaattataacttttaaaaaaaatgtataaattatacctggcctgtacagctgtttcctacctactcttcttgtaaactctgctgcttcccaacacaactagagtgcaattttggcatcttaggagggaaaaaggacagtttacaactgtggccctatttattacacagtttgtctatcgtgtcttaaatttagtctttactgtgccaagctaactctaccttataggactgtactttttgtattttttgtgtatgtttattttttaatctcagtttaaattacctagctaaaaaaaaaaaaaaaaaaaaaaaaaaaaaaaaaaaaaaaaaaaaaaaaaaaaaaaaaaaaaaaaaaaaaaaaaaaaaaaaaaaaaaaaa

SEQ ID NO: 354 - DNA, 901 bp, Homo Sapiens
gggatctcggactccctggaccctccctccagcccagcctcgctagctccgcctgcggtacgtgctcccgcctccgactcaaaatgcctgtctggggaggtggaaacaagtgtggggcctgtgggaggaccgtgtaccacgcagaagaggtgcagtgtgatggcaggagcttccaccgctgctgctttctctgcatggtttgcaggaaaaatttagatagcacaacagtggcaattcacgatgaagagatctactgcaaatcctgctacggaaagaagtatgggccaaaaggctacggttatggccagggcgctggcacgcttaacatggaccgtggcgagaggctgggcatcaaaccagagagtgttcagcctcacaggcctacaacaaatccaaacacttctaaatttgctcagaaatatggaggtgctgagaagtgttccagatgtggggattctgtatatgctgccgagaagataattggagctggaaagccctggcacaaaaactgtttccgatgtgcaaagtgtgggaagagtcttgaatcaacaactctgactgaaaaagaaggtgaaatctattgtaaaggatgctatgcaaagaactttgggcccaagggatttggctatggccaaggagcaggggctcttgttcatgcccagtaagatgtaaaccctgaactaaacatcacacactgagaatctcttcataatctaggcacagataatctttaacactaaactactgtgaaattctaccagcattaagtactgtatatcgccctgtacttggataggctggctaactcgtaggaagagagcactgtatggtatccttttgctttattcaccagcattttgggggaacatttcttttacattttaaataaaacttcagcttg

SEQ ID NO: 355 - DNA, 1496 bp, Homo Sapiens
gcgagcgccgggaacgagcaccaccagggctggagcggacggctttagaagagcctagctgctgcgcgcgtcggagaggctcctgggaaactcccacggcccagggactttcgaaagcagagcgaggagccctcgcacgcgctagtctgcgagtgagcgctcagcccggcacctgttcctccagcgccgccgccttcccacccctcggacccgcgccgctcgcggcgcccgcccgttcctgcgatgaatccggccctaggcaaccagacggacgtggcgggcctgttcctggccaacagcagcgaggcgctggagcgagccgtgcgctgctgcacccaggcgtccgtggtgaccgacgacggcttcgcggagggaggcccggacgagcgtagcctgtacataatgcgcgtggtgcagatcgcggtcatgtgcgtgctctcactcaccgtggtcttcggcatcttcttcctcggctgcaatctgctcatcaagtccgagggcatgatcaacttcctcgtgaaggaccggaggccgtctaaggaggtggaggcggtggtcgtggggccctactgacccgccctctgcccccgcggcaaccgctcccacgcctgcccactttgctagcccggctgtgcccctcactatcagagactgggcgaagcaaacctgtcggagtcaattatttctctcgacttcggcctttcggaaagaagcgaccggtttctccctcgccctctgaaagtcctcatgcctggcagtcggaggagagcgcccagactctgaactcagcagaaagtggcaagaagagggcgattagggcgcagaactttggaagctgctacttacttggaatgcggggagaccgacggtgcgaaggcccttctccacccgcaggtgggccaagctctgggggcaggtggagagggcgggcaggggagagacccagcggcactgatcgccttgtgaccggaagagtgacctgttaaaagccacgcagcagactcatggggtctcacaaatccgtgtccgggtgcgctcccactcttctcctgctccccccctgccctggaggggaggggcgataaatacctttgattgtaacgtgccgttttaagaggttttgtgtttgtttgcttgaatacaaatgtttgataagtctttttctgccccagtggcctgtttgcctgcctgaggagttacagttttgtcattgtgggagaaggggtggggggagggggagcctgcgaatttgaacggggtgagttgtttcttttagtgcatttcccactgggtcttttgggaggcgtctagcgttcctgctggccctgggacaaagacccagaatagaactcgtagctcgtgactgcacggtttacgccacaaaagtgctcttgacatccgtgacaccgttttgactttttgtttttttcttatttaacatttccttaataaatgcaacatttaagcgtttaaaaaaaaaaaaaaaaaaaaaaaaa

SEQ ID NO: 356 - DNA, 725 bp, Homo Sapiens
ctcttgagaccgggagcccagctgcccaccctctggacattcacccagccaggtggtctcgtcacctcagaggctccgccagactcctgcccaggccaggactgaggcaagcctcaaggcacttctaggacctgcctcttctcaccaagatgaactcactggtttcttggcagctactgcttttcctctgtgccacccactttggggagccattagaaaaggtggcctctgtggggaattctagacccacaggccagcagctagaatccctgggcctcctggcccccggggagcagagcctgccgtgcaccgagaggaagccagctgctactgccaggctgagccgtcgggggacctcgctgtccccgccccccgagagctccgggagcccccagcagccgggcctgtccgccccccacagccgccagatccccgcaccccagggcgcggtgctggtgcagcgggagaaggacctgccgaactacaactggaactccttcggcctgcgcttcggcaagcgggaggcggcaccagggaaccacggcagaagcgctgggcggggctggggcgcaggtgcggggcagtgaacttcagaccccaaaggagtcagagcatgcggggcgggggcggggggcggggacgtagggctaagggagggggcgctggagcttccaacccgaggcaataaaagaaatgttgcgtaactcaaaaaaaaaaaaaaaaaa

SEQ ID NO: 357 - DNA, 1937 bp, Homo Sapiens
aaactttctctgatctcctctctctctgtgtctgctccaaatgtagacagcaattgtctgggtaggaccagcttataaagaagcatggctttgttaaggaagtcgtattcagagcctcagcttaagggtatagttaccaagctatacagccgacaaggctaccacttgcagctgcaggcggatggaaccattgatggcaccaaagatgaggacagcacttacactctgtttaacctcatccctgtgggtctgcgagtggtggctatccaaggagttcaaaccaagctgtacttggcaatgaacagtgagggatacttgtacacctcggaacttttcacacctgagtgcaaattcaaagaatcagtgtttgaaaattattatgtgacatattcatcaatgatataccgtcagcagcagtcaggccgagggtggtatctgggtctgaacaaagaaggagagatcatgaaaggcaaccatgtgaagaagaacaagcctgcagctcattttctgcctaaaccactgaaagtggccatgtacaaggagccatcactgcacgatctcacggagttctcccgatctggaagcgggaccccaaccaagagcagaagtgtctctggcgtgctgaacggaggcaaatccatgagccacaatgaatcaacgtagccagtgagggcaaaagaagggctctgtaacagaaccttacctccaggtgctgttgaattcttctagcagtccttcacccaaaagttcaaatttgtcagtgacatttaccaaacaaacaggcagagttcactattctatctgccattagaccttcttatcatccatactaaagccccattatttagattgagcttgtgcataagaatgccaagcattttagtgaactaaatctgagagaaggactgccaaattttctcatgatctcacctatactttggggatgataatccaaaagtatttcacagcactaatgctgatcaaaatttgctctcccaccaagaaaatgtaaaagaccacaattgttcttcaaaaacaaacaaaacaaaacaaaacaaaattaactgcttaaatgttttgtcggggcaaacaaaattatgtgaattgtgttgttttcttggcttgatgttttctatctacgcttgattcacatgtactcttttctttggcatagtgcaactttatgatttctgaaattcaatggttctattgactttttgcgtcacttaatccaaatcaaccaaattcagggttgaatctgaattggcttctcaggctcaaggtaacagtgttcttgtggtttgaccaattgtttttctttctttttttttttttagatttgtggtattctggtcaagttattgtgctgtactttgtgcgtagaaattgagttgtattgtcaaccccagtcagtaaagagaacttcaaaaaattatcctcaagtgtagatttctcttaattccatttgtgtatcatgttaaactattgttgtggcttcttgtgtaaagacaggaactgtggaactgtgatgttgtcttttgtgttgttaaaataagaaatgtcttatctgtatatgtatgagtcttcctgtcattgtatttggcacatgaatattgtgtacaaggaattgttaagactggttttccctcaacaacatatattatacttgctactggaaaagtgtttaagacttagctaggtttccatttagatcttcatatctgttgcatggaagaaagttgggttcttggcatagagttgcatgatatgtaagattttgtgcattcataattgttaaaaatctgtgttccaaaagtggacatagcatgtacaggcagttttctgtcctgtgcacaaaaagtttaaaaaagttgtttaatatttgttgttgtatacccaaatacgcaccgaataaactctttatattcattcaaaga

SEQ ID NO: 358 - DNA, 1787 bp, Homo Sapiens
ggccgaacctggttcccgaggcgcggcggccgcggctgggggcggggaggggggcgcaggaccccaagtgggggtcccggagccagagggccaattcctgtccccccagcagcatggcatcgtgtgctgaaccctctgagccctctgccccactgcccgccggggtcccaccgctcgaggacttcgaggtactggatggggttgaggatgcagagggtgaggaggaagaggaggaggaagaggaggaagaggatgacctgagtgagctgccaccgctggaggacatgggacaacccccggcggaggaggctgagcagcctggggccctggcccgagagttccttgctgccatggagcccgagcccgccccagccccggccccagaagagtggctggacattctggggaacgggctgttgaggaagaagacgctggtcccagggccgccaggttcgagccgcccggtcaagggccaggtggtcaccgtacatctgcagacgtcgctggagaatggcacacgggtgcaggaggagccggagctggtgttcactctgggtgactgtgacgtcatccaggccctggatctcagtgtcccactcatggacgtgggggagacggccatggtcactgctgactccaagtactgctacggcccccaaggcagcaggagcccatacatccccccgcacgcggccctgtgcctggaggtgaccctgaagacggctgtggacgggcctgacctggagatgctcacggggcaggagcgcgtggccctggccaaccggaagcgggagtgcggcaacgcccactaccagcgggcggacttcgtcctggccgccaactcctacgacctcgccatcaaggctatcacctccagcgccaaagtggacatgacgttcgaggaggaggcacagctcctgcagttgaaggtgaagtgtctgaacaacctggcggcctcgcagctgaagctcgaccactaccgcgcagccctgcgctcctgcagccttgtgctggagcaccagccagacaacatcaaggctctcttccgcaagggcaaggtgctggcccagcagggggagtacagtgaggccatccccatcctgagggcagccctgaagctggaaccttccaacaagacgatccacgcagagctctcaaagctggtgaagaagcatgcggcgcagcggagcacggagaccgccttgtaccggaaaatgctgggcaaccccagccggctgcctgctaagtgccctggcaagggtgcctggtccatcccatggaagtggctgtttggggcgactgctgttgccttggggggtgtggcactctctgtggtcatcgctgccaggaactgaccacctaggtggctgccaccccctctgcacaccatggaccctgccctgcgctccccaactcccccaggctccctgtccactgccctccctggtctggccccctcctccgggttaggggagcaaggattgggggtcgtgcagcccagccagcaggagggactgaggccctctaggaggaaagcccagagggagggggccctcattccttcagacccagttttcccccaccctccttaccccgctgggctaggtctccgccagggctggcctcagtttctcctcaacaggcctgggggcagcccttcccctgcctagtccccgcctgagtgccagccccccaccccgcctgccgccccctgtccaggttccctccccgccacagtgaaataaagcatcccaccctgcagtttcaaaaaaaaaaaaaaaaaaaaa

SEQ ID NO: 359 - DNA, 1321 bp, Homo Sapiens
ggcgctgggcagtgtggaggtcgttggagtcacttccgcgtcaccagctcctgtgcctgccagtcggtgcccctcccgctccagccatgctctccgccctcgcccggcctgccagcgctgctctccgccgcagcttcagcacctcggcccagaacaatgctaaagtagctgtgctaggggcctctggaggcatcgggcagccactttcacttctcctgaagaacagccccttggtgagccgcctgaccctctatgatatcgcgcacacacccggagtggccgcagatctgagccacatcgagaccaaagccgctgtgaaaggctacctcggacctgaacagctgcctgactgcctgaaaggttgtgatgtggtagttattccggctggagtccccagaaagccaggcatgacccgggacgacctgttcaacaccaatgccacgattgtggccaccctgaccgctgcctgtgcccagcactgcccggaagccatgatctgcgtcattgccaatccggttaattccaccatccccatcacagcagaagttttcaagaagcatggagtgtacaaccccaacaaaatcttcggcgtgacgaccctggacatcgtcagagccaacacctttgttgcagagctgaagggtttggatccagctcgagtcaacgtccctgtcattggtggccatgctgggaagaccatcatccccctgatctctcagtgcacccccaaggtggactttccccaggaccagctgacagcactcactgggcggatccaggaggccggcacggaggtggtcaaggctaaagccggagcaggctctgccaccctctccatggcgtatgccggcgcccgctttgtcttctcccttgtggatgcaatgaatggaaaggaaggtgttgtggaatgttccttcgttaagtcacaggaaacggaatgtacctacttctccacaccgctgctgcttgggaaaaagggcatcgagaagaacctgggcatcggcaaagtctcctcttttgaggagaagatgatctcggatgccatccccgagctgaaggcctccatcaagaagggggaagatttcgtgaagaccctgaagtgagccgctgtgacgggtggccagtttccttaatttatgaaggcatcatgtcactgcaaagccgttgcagataaactttgtattttaatttgctttggtgatgattactgtattgacatcatcatgccttccaaattgtgggtggctctgtgggcgcatcaataaaagccgtccttgattttatttttcaaggtcccttctgtaaaaaaaaaaaaaaaaaa

SEQ ID NO: 360 - DNA, 1738 bp, Homo Sapiens
gaattccgggggttccggcgctccgcggccccaagcgccctcctttcctccctccgccggccggggttgcgggcgcggggcgccgcgggccatgcgatctcggcgcggcccagcccggccggcggcgccccgcccccgctggagcctggggccccgctgcgccgaggccatgttcccggtgtttccttgcacgctgctggccccccccttccccgtgctgggcctggactcccggggggttggcggcctcatgaactccttcccgccacctcagggtcacgcccagaaccccctgcaggtcggggctgagctccagtcccgcttctttgcctcccagggctgcgcccagagtccattccaggccgcgccggcgcccccgcccacgccccaggccccggcggccgagcccctccaggtggacttgctcccggtgctcgccgccgcccaggagtccgccgcggctgctgcggccgctgccgccgctgctgccgccgtcgctgccgcgcccccggcccctgccgccgcctctacggtggacacagcggccctgaagcagcctccggcgccccctccgccacccccgccagtgtcggcgcccgcggccgaggccgcgccccccgcctccgccgccactatcgccgcggcggcggccaccgccgtcgtagccccaacctcgacggtcgccgtggccccggtcgcgtctgccttggagaagaagacaaagagcaaggggccctacatctgcgctctgtgcgccaaggagttcaagaacggctacaatctccggaggcacgaagccatccacacgggagccaaggccggccgggtcccctcgggtgctatgaagatgccgaccatggtgcccctgagcctcctgagcgtgccccagctgagcggagccggcgggggagggggagaggcgggtgccggcggcggcgctgcagtggccgccggtggcgtggtgaccacgaccgcctcggggaagcgcatccggaagaaccatgcctgcgagatgtgtggcaaggccttccgcgacgtctaccacctgaaccgacacaagctgtcgcactcggacgagaagccctaccagtgcccggtgtgccagcagcgcttcaagcgcaaggaccgcatgagctaccacgtgcgctcacatgacggcgctgtgcacaagccctacaactgctcccactgtggcaagagcttctcccggccggatcacctcaacagtcacgtcagacaagtgcactcaacagaacggcccttcaaatgtgagaaatgtgaggcagctttcgccacgaaggatcggctgcgggcgcacacagtacgacacgaggagaaagtgccatgtcacgtgtgtggcaagatgctgagctcggcttatatttcggaccacatgaaggtgcacagccagggtcctcaccatgtctgtgagctctgcaacaaaggtactggtgaggtttgtccaatggcggcggcagcggcagcagcggcagcagtagcagcccctcccacagctgtgggctccctctcgggggcggagggggtgcctgtgagctctcagccacttccctcccaaccctggtgagctccaagttggttgcgggggagaggggagaatggagtagagtcccttggtacaagctcctctcccccctcttttcccaccaactcctatttccctaccaaccaaggagcctccagaaggaaaggaggaagaaatgttttcttaggggaattc

SEQ ID NO: 361 - DNA, 1306 bp, Homo Sapiens
cgcgcttggccttgcccgcgcccgctcgcctcgtctcgcccggcctccccgcgtcgcctcgtcgcctgttccgcgccaggcatggcccccagcactgtggccgtggagctgctcagccccaaagagaaaaaccgactgcggaagccggtggtggagaagatgcgccgcgaccgcatcaacagcagcatcgagcagctgaagctgctgctggagcaggagttcgcgcggcaccagcccaactccaagctggagaaggccgacatcctggagatggctgtcagctacctgaagcacagcaaagccttcgtcgccgccgccggccccaagagcctgcaccaggactacagcgaaggctactcgtggtgcctgcaggaggccgtgcagttcctgacgctccacgccgccagcgacacgcagatgaagctgctgtaccacttccagcggcccccggccgcgcccgccgcgcccgccaaggagcccaaggcgccgggcgccgcgcccccgcccgcgctctccgccaaggccaccgccgccgccgccgccgcgcaccagcccgcctgcggcctctggcggccctggtgacccggcgggacctgcgggcgcgcggcccgacgaccagagggcgagcctgctcctctcgcctgtagggaagcgccttcccgccgtcgtccgccccgggcttggacgcgcccttctccggaaggctctggccccaagctggccggcccgcaggagccccattctcagagaatgtgtgtgcagagtccctgccgttttaggacaatcagggcccatcttctgccaagtgtctgaccccatggggttgttctgtgtttgcatttaagcaagtgacttctgggaagtccccggccgcccggggttctatgatatttgtagtgccggggctcgcacactgctgcccccagcctgtagaggactttcttcagggcccgtagctgctgggcgtacccctggcaggcgggctgtgccgcgggcacatttgccttttgtgaaggccgaactcgagctgtatcctcataggaaacagtgatcaccccggacgggcgtccaggaccctgagggccatggccaaaaggctcctgagtgtgcctggtggtctggctggggctcacggtgggctgtctggggagggtgggtgcctccactatgatccttaaaggattcctctgtgtgggtggatgcgtgtgggcacgactttgtactcagaaattgaactctcagtcacgtggaagccacgggactgctccgaagccgccataataaaatctgattgttcagcccccaa

SEQ ID NO: 362 - DNA, 7147 bp, Homo Sapiens
gggccgcgcgtggcggcggcgatgggcgagggcgggctgcccccggccttccagctgctgctgcgcgcgtgtgaccagggcgacacggagacggcgcggcggctgctggagccgggggcggcggagccagccgagcgcggcgcggagccggaggcgggcgcggagccggcgggggccgaggtggccgggcccggggccgcagcggcgggggcagtcggggctccggtgcccgtggattgctcggacgaggcgggcaacaccgcactgcagttcgccgcggccgggggccacgaaccgctggtgcgcttcctgctgcgccgcggtgcctcggtcaacagccgcaaccactacggctggagcgcgctcatgcaggcggccagatttgggcatgtgagtgtggcacacctcctgttggatcacggggctgatgtcaatgcccagaaccggctgggggccagtgtgctcactgtggcttctcggggcggccacctgggtgtggtgaagctgctcctggaagccggtgcctttgtggaccatcaccacccttcaggcgagcaactggggttgggcggcagcagggatgagcccttggacatcacagccctgatggctgccatccagcacgggcacgaggccgtggtgcgtctactgatggagtggggcgcggaccccaaccacgcagcccggaccgtgggctggagcccgctgatgctggccgcactcactgggcggcttggagtggcccagcagctggtggagaagggcgccaaccctgaccacctcagcgtgctggagaagaccgccttcgaggttgcactggactgcaagcacagggaccttgtagactacctggacccgctgaccaccgtcaggcccaaaacagatgaggagaaaaggcgacctgatattttccatgcattgaaaatgggaaacttccagctggtcaaagagattgccgatgaagaccccagccacgtgaacttggtcaatggggacggggcgacgccactgatgctagcagctgttacggggcagctggctctggtgcagctgctggtggagaggcacgcggatgttgacaagcaggacagcgtgcatggctggacggccctcatgcaggcaacctaccatgggaataaggaaattgtgaaatatctgctaaaccaaggggccgatgtcactcttcgtgcaaaaaatggatacacggcctttgacctggtgatgctgctgaatgatcccgacacggaacttgttcgactgctggcatctgtctgcatgcaggtgaataaagacaaaggccggccgagccaccagcctcccctgccccactcgaaggtccgacagccctggagcatcccagtgctgcccgatgacaagggtggactgaagtcctggtggaaccgaatgtccaatcggttccgaaagctcaaactgatgcagacgctgccccgtgggctgtccagcaaccagcctttgcctttctctgacgagcctgagccagctctggactccacaatgagggctgccccccaggacaagacaagccgctctgcactccctgatgcggcccctgtgaccaaagacaatggtcctgggagcacaagaggagaaaaggaagacacgttattgacaaccatgcttcgaaacggagctcccctcaccagactcccgagtgacaagctgaaagcagtcatccccccattcctacccccttccagttttgagctgtggagctctgatcggtcccggacgcgtcacaacgggaaggcagaccccatgaagactgcgctgccccagagagccagcaggggccaccccgtgggcggcgggggcacagacactacacccgtcaggcctgttaaatttccaagcctccccagaagcccagcctcttctgccaattctggaaacttcaaccactcgcctcattcatcgggcggctccagtggggtaggtgtgagccggcacggtggggagctgcttaaccgctcaggtggcagcatagacaatgtcttgtcccaaatcgctgcccagaggaaaaaagcagccggattattggagcagaaacccagccatcggtcaagccctgtggggccagcaccggggtccagcccgtctgagcttccagcctcccctgcaggtggcagcgctcctgttggcaagaaattggagaccagcaaaaggcctccatctggaacttccactacctccaagagcacctctccaaccctcacgccctccccctcacccaaagggcacactgcagagtcctcagtgtcttcctcgtcatcccatcggcagtccaagagcagtgggggctccagcagtggcaccatcacagatgaggatgaactgactggaatccttaagaaattatcacttgagaaatatcagcccatttttgaggaacaagaggtggacatggaagcgttcctcacactgactgacggtgacttgaaggagctgggaattaagacagatgggtccaggcagcagattctggcagcgatttctgaactgaacgcaggcaagggacgcgagagacaaattttacaggaaaccattcacaactttcactcttcctttgagagcagtgccagcaacaccagggcccctggcaacagcccctgtgcgtgatcctccttcccgcagccaccagcgtgagctctctgaatcccgggaccccttcacgtggccacagccccagccctgcccccgtcacactgctgtgccttagtcatgttgttccctttgctcgggatgcccacttcacgtcgacggcattcattggtagtacttcttgctgcaacaaacttcaacacacagagacagattcccatgtaacagtccagtgggggtgcttctgcttggcaggttggttcacacagtgatgcagggactcagctcctttcatcctgtgctctgccctccccgggagcctcagagtttgcttctggctggcggcaagggaaagggacgatggagaaggcacggctgcttcttacctgccttgctcttaactgacacacatcactcctgctcacgtcctcttggccactggtagtcatgtggccccacctggatgcagaggaggccaggatgtgcagtctccacatagtggcttcccagcaacaacttttgacttagatggggggtatgtattatggtgagaggttagccttcctggcacatcttcccttaaaacttctaacttgcccctcctagtccaagtcacctctcagatgaagtcttttttgaccccctttcagccactgggtcccttagtgctgtgtatgtgactgctgtagcattccactgcacctgctgcatacagcttacattggagatgtgtatgtcaaacgcatttttctttattgcaaagagagtctattatagaaggaaagaagtggaggcctgctgtgtggatcccttcttcttcctagctttcagtttccttatctgcaaagtggaaggtcagaccagatgatgctctggtactccacagtgctcacctgtatcactgcagggctttctgcactgaaagtggaagcagaaggctaatgggtcacattgtgtaaaggtctctggtgctcaaagtttctaggcaaagaagtgaaaatttggaattttgtctacatcctattaatgctgtgttcctcaaaagggaattggcttgtgtagtttcctaccatatcatattttattaaattagaggggccctgacttttaaaacccactggctttctgaagtgttttccagtgaatgactcattcagccagtgcttgttgcatttatgttagctaccaggtgccaagtgtgcagacacaatacagagccttcaggctctcgacaggcaagagaacacctgtaaatagatggtcccgacattgagaggcagcatggtagagtgggcagaccttgtgctctggactcaggttcaaagttcagatgaagctcaatggcctcttagttggagcttagaaccagtatgcccaaagtgctgggtctgcaggaagtacccagtcgatggtaggctgcacagaattctgatctctaccttgagccatgctgagccacaagttggtctccttgggaggtgccatctctcatctgtccctcccccagccatgaaagcccattcccctatgctggctttcagaggctgtcgttaacttactgcccagagcctcgtagttttcttcccctgccctgatggttgggtgtttttcctttaaattctctcagccttacactcacagaagccaactttccacaggactgaagacaaagtgtttcatttagctgttactgatagacacctttacaaaggttactaatgtcccagcctttttaaggagacacactcattcatcccctactatgtgctggcagctttacctttgtcatttcatcctcatggccaccctggaggtggcattgtgtaacctcatcttgcacattcgggaaacggatgcttaggagagggaagcagcttgccagttaaacagcccagaaggagcagatctggggtcagaaccggacctggtgggcttgcaagcctgtgccttttccactaactcctatagactcctggagctagaagcacttgtgattcttgttttaatttactgatggcttcaggggttaacagtaggcctagaattgtttgcctctgaaattcatggcccctgacgttatgtgctttgaggttttgtgcctgctttttgctgtggtcctgtttttttcataacaatatactggtatagcttccactcaggtaagtttgattgaacaatgatacacagctgcaccggggggtcaccttttcacaaatgtagacctccatgaactcattggatgaccctggacagagcggggctattcccattttgcagacaggacagcagaggctccagacaatgcctttcctttctttttcactggactcaagtgtccaaggcttttcatcctaggaagtttgtgtgctggttcacaagaggtccctggcaccctttctggggatgtttggatgcggctggtaggcagggaagagaaagggcaccccagcgggggcatgtgtggaggcagcacggaacatgtaggttatagatcgtcagggaggaggggtcagttgggtgcttgtttttctgatttttggtccttgatcacccccttcccttcccacacgtgtccccagcctgcctgtggctgttccccccacaagaagcacctcccttgcttggcaaccttcaccagcatttcccaaaagtatgctcctgggaaccctagttccacaggataataggtttttcataaagaaacgtagggtgtgtatgtgaaagtggggtgaggttccctggttgagtaggtttggcagacactaaagcgagctacacgatcatctttgctacaggcctctcacaaccttcagcatgccagcatgggtcaggcctcttcacagggccaagaaactcatagcatctcccacattactctcatcacttctccaaggtgcttttgcaagactggaattccttggacaccattggagaagccccgctttttctggaacagcggcaaccaagaggccttgcagccctggaagtgggtcagggcccttggtggtcacctttttctccccagcagctctgcagaggtggcctgcttggcagtgggacatcaggggaccggtcctgctttgagatggcagggtccctgttctgagagctctccagcctgagggcattgagctgaggctccaccctgagctctcctgcagggtggagggcattgtttcccagcacccaggcagtgtcttgctggtgtgtcgtgagtgctggatgtccaagtccctgctggccacggagggctcctgcctctcttcttcagcgccacaaaattacatggaggccagctggttttgtgaggagattgtttattttttaattcttttgtttaccgaacgtttactgagcatctaccctgtgccagccctactcgtacgctctgtctccaaagatgaaaaaggacttctctgccctcaagggaaccccacagtatcttagaggagacaatcatgtcggtgagatggtgtggtgatgaagcctgctgggtatacagctcagggaaagtcatcgatgatggctcaggctcagcctgggcacgccccagaggagagagatggagtggggcctcaaagggcaggtttaggcagaaaagaaaaagggcattccagctggggcatgtgcaaaggcagcacgtaatgtgtaagttctagatcgtcagggaggaagggtcagttgggtgcctgtttttctgtttttagtcctttaaaatgagtagaagcaacctgttaccctggaaagagcactggacatagacctagtgctgcgtgatgttgagcacgtttcttcttccctttgagtcccagtttcccttttggttacagggggatagtagcccccagggatcatgtgaaagtgagaaagcccttttcacactgtggagcggtgcagatgtgggaaacctcaaagatggttgcccattttaaatcctttcatctctcatctctctttcttctctcccttctgccctgacgtagccatggttgggtgggtgaggccagaagaaactgcctccggcaagaggtagcagccgctcaggtggctctgctggcatcggagcccacagaagtgaggagtggccgatggacctgccctccaaatgtgcctgactctgggtcttgctgtcactggatttcctggcatggcagacagaaagaaagatagtttgaccaagtcgtagaagctgatccagcgggtaaaaagggggcagggaactcgtcccttttattcttgcctcagagctgcctgaagacatgggccaggccggaggctggacaactttggataacgctgacctgtacttccaagtaaatgcctcctgaagagcccgggacccttcctgggagaattctgcagccagaatgaaggtgccatcagcaggaggcactgtgaagcaccatcctgtcgctgtccttgtccattcctagcaagttaatcgtgtcttgttaaccagcagttcctgttcaacgtgtaaagagacctgatgttttccctaataaagctgataacagattttgcagga

SEQ ID NO: 363 - DNA, 2324 bp, Homo Sapiens
cgcgctggagaggcgcggggtcaagacgtccggcctcgggggcccgggctgggccgccgagtcccctgggcggcgctgagcgggcgggaggcgggggcccgcggctcggggcaaccgaggccgggtcgcgggatcggccgccatcgccgccgccgctgcactgggagcccgcggggatggagcgggaggcgttgccgtggggcctcgagccccaggatgtgcagagttctgacgaaatgaggagccccgaagggtacctcagaggcaacatgagtgagaatgaggaagaggaaatttctcagcaagaaggcagtggggactatgaagtcgaagagataccatttgggcttgaaccccagagccctgggtttgagccacaaagcccagagtttgaaccccaaagccccagatttgagcctgaaagcccggggtttgagtcccgaagccctgggcttgtgcccccaagccctgagtttgcacccagaagccctgaatcagattctcagagccctgagtttgaatcccagagccctaggtatgaaccccaaagccctggctatgaacctcggagccccgggtatgaaccccggagccctggctatgaatctgagagctctagatatgaatcccagaacactgagctcaaaacccaaagcccagaatttgaagctcaaagttccaaattccaggaaggtgcggagatgcttctgaaccccgacgaaaagagtcctttgaatatctccgtaggagttcaccccctggactccttcactcaggggtttggggagcagcccacaggggacctgcccatagggccaccttttgagatgcccacaggggccctgctgtctacaccgcagtttgagatgcttcagaatcccctgggtctcacaggagcccttcgaggtccaggtcggcggggtggccgggccaggggtgggcagggccctcggcctaacatctgcggcatctgcgggaagagcttcgggcggggctccaccctgatccagcaccagcgcatccacaccggtgagaagccctacaaatgtgaggtctgcagcaaggccttctcccagagctctgacctcatcaaacaccagcgcacccacactggcgagcggccctacaaatgtccccgttgcggcaaggccttcgccgacagctcttacctgcttcgccaccagcgcactcactctggccagaagccctacaagtgcccacattgtggcaaggccttcggcgacagctcctacctcctgcgacaccagcgcacccacagccacgagcggccctacagctgcaccgagtgcggcaagtgctatagccagaactcgtccctgcgcagccatcagagggtgcacaccggtcagaggcccttcagctgtggcatctgcggcaagagcttctcccagcggtcggcccttatcccccatgcccgcagccacgcccgggagaagcccttcaagtgccctgagtgcggcaagcgctttggccagagctcggtgctggccatccacgcccgcacccacctgccaggccgcacctacagctgccccgactgcggcaagaccttcaatcgctcctccactctcatccagcaccagcgctcccacacgggcgagcggccctacaggtgcgccgtgtgcggcaagggcttctgccgctcctccacgcttctgcagcatcaccgggtccacagtggcgagcggccttacaagtgcgatgactgcggaaaggccttctcccagagctccgacctcatccgccaccagcggacccacgcggcgggccggcgctgacctggggccccagcaggggtgggaggtgtgggcagaagataaggggccagggagctagaggaacctttagggaggatagtggagaagccgcaggagaatggaggagctgaggatgctggaagaagagaaccagggtggaggaagtgacatgccctggagacttgtgggaagtgggttggagggaggccaggccggcagcgggaggccctgggagaaatggagagaggtcagcggagggctggcctcagccgcggctccttggtgggtgcctggcttggcaactgctagagcagggaggggggagggcaggggattacctaattagagtgggttagcttagattggtagctgctgaaactctcgttgagtcaggagcgggtaaaaggtaggtggggtggggagtggggccccggggtggggcctgggcctctgcgtgcaaaccccagcctccctcttcttcctcaggctttggagcccctgagtttgagttcaataaaaactttatgtggtaaaaaaaaaaaaaaa

SEQ ID NO: 364 - DNA, 4519 bp, Homo Sapiens
cagccagggccaccccaggggctataagagcaactagatttctggagcagctcggggatgggtgccatttgagcccagcttggctccccctcctggctggcctccttcctgcccttctgcctgcctgtgtctgctgagattctgcaaagaggaacgttggcaccatgtctctgctcaaccctgtcctgctgccccccaaggtgaaggcctatctgagccaaggggagcgcttcatcaaatgggatgatgaaactacagttgcctctccagttatcctccgtgtggatcctaagggctactacttatactggacgtatcaaagtaaggagatggagtttctggatatcaccagcatccgggatactcgctttgggaagtttgccaagatgcccaagagccagaagctccgggacgtcttcaacatggactttcctgataacagtttcctgctgaagacactcacggtggtgtccggcccggacatggtggacctcaccttccacaacttcgtctcctacaaggagaacgtgggcaaggcctgggctgaggacgtactggccctagtcaaacatccgctgacggccaacgcctcccgcagcaccttcctggacaagatccttgtgaagctcaagatgcagctcaactctgaagggaagattccggtgaagaactttttccagatgtttcctgctgaccgcaagcgggtggaagctgctctcagtgcctgccacctccccaaaggcaaaaatgacgccatcaatcctgaggacttcccagaacctgtctacaagagtttcctcatgagcctctgtcctcggccagaaatagatgagatcttcacttcttaccatgctaaggccaaaccctacatgacgaaggagcacctgaccaaattcatcaaccagaaacagcgggactcccggcttaactccctgctgttcccgccagcacggcctgaccaggtgcagggcctcatcgacaagtatgagcccagtggcatcaatgcacagaggggccagctgtcacctgaaggcatggtctggtttctctgtgggccagagaacagcgtgctggcccaggacaagctgctgctccaccacgacatgacgcagccactcaatcattacttcatcaactcgtcccacaacacctacctgacagccggccagttctcaggcctctcctcggctgagatgtaccgccaggtgctgctctctggctgccgttgcgtggagctagactgctggaaggggaaaccccctgacgaggagcccattatcacccatggcttcaccatgaccacagacatcttcttcaaagaagcaattgaggctattgcagaaagtgcctttaagacctccccctatcccatcatcctgtcgtttgagaaccatgtggactcaccccgccagcaggctaagatggctgagtattgccggacgatctttggggatatgctgctcacagagcccctggaaaagttcccactaaaaccaggtgtccccctgcccagccctgaggatctcaggggcaagatcctcatcaagaacaagaagaaccagttttctggccccacctcctccagtaaggataccggtggggaggctgagggcagcagcccacccagtgcccctgcagtgtgggctggcgaggaagggactgagctggaggaggaggaggtggaagaggaagaggaggaggagtcaggaaacctggatgaagaagagattaagaagatgcagtcggatgagggcacagcgggcctggaagtgacggcttatgaggagatgtccagcctagtcaattacatccagcccaccaagttcgtctcctttgagttctctgcccaaaagaaccgaagttatgtcatctcgtccttcacagagctcaaggcatatgacctgctctccaaggcctcggtgcagtttgtggactacaacaagcgccagatgagccgcatttaccccaagggaacccgcatggactcctccaactacatgccccagatgttctggaatgctggatgccagatggttgccctcaacttccagacgatggacttgcccatgcagcagaacatggcagtatttgagttcaacgggcagagcggctacctcctcaagcatgagttcatgcgccggccggacaagcagttcaaccccttctcagtggaccgcatcgacgtggtggtggccaccaccctttccattacggtgatctctgggcagttcctgtcagaacgcagcgtgcgcacctatgtagaagtggagctgtttggccttcctggggaccccaagaggcgctatcgaactaagctgtcacccagtactaactccatcaatcctgtctggaaggaggagccctttgtctttgagaagatcttgatgcctgagctggcctccctcagagtggctgtgatggaggaaggcaacaagtttcttggacaccgcatcatccccatcaatgccctaaattctgggtaccaccacctgtgcctgcacagtgagagcaacatgcccctcaccatgcctgcgctcttcatcttcctggagatgaaggactacatacctggtgcttgggcagatctcactgtggccctcgccaaccccattaagttcttcagtgcccatgacacgaagtctgtgaagctcaaggaggccatgggaggtctgcctgagaagcccttcccactggcgagtccagttgccagccaggtcaatggggcgttggccccaacgagcaatgggtcaccagcagccagggccggggccagggaagaggctatgaaagaagctgcggagccgcggaccgccagcctggaggagctccgggagctaaagggcgtggtgaagctgcagcggcggcacgagaaggagctgcgagagttggagcggcgcggagcgcggcgctgggaggagctgctgcagcggggcgcggcgcagctggcggagctcgggccaccgggcgtggggggcgtcggggcctgcaagctcggtcccggcaagggctctcgcaagaagaggagcctgccccgcgaggagagcgccggagccgcgccgggcgagggccctgagggcgtggacgggcgcgtgcgggagctgaaagacaggctggagctggagctgctgcggcagggcgaggagcagtacgagtgcgttctgaagcgcaaggagcagcacgtggccgagcaaatctccaaaatgatggagctggccagagagaaacaggcggcagagctgaaggccctgaaggagacgtcggagaacgacaccaaagagatgaagaaaaagctggagacaaagagactggagcggatccagggcatgaccaaagtcaccacagacaagatggcccaggagaggttgaagagagagattaacaactcccacatccaggaagtagtgcaggtgatcaagcagatgacggagaacttggagaggcaccaggagaagctggaggagaagcaggcggcttgcctggaacagatacgggagatggaaaagcagttccagaaggaggcgctggcagagtacgaggccaggatgaagggtctggaggcagaggtgaaggagtcggtgagggcctgcctcaggacctgctttccctccgaggccaaggacaagcctgagagggcctgcgagtgccccccagagctgtgtgagcaggacccactcatagcaaaggcagatgcccaggagagccgcctctgatgcccccatcccactgggacatttagcaaggaggttcagccccttctctgggatgtggttctattcccccaggaaaaaggagccccagccttctgaggctgtgggaacctgtggctgccttggacgctgcagccccctcctcaacggccaggccagagtctgagacaggacccaggcaccctcacggcagggcctctctggggcctagaagtcttctcaagctgacttcctacctccccctccatctctagataagtgtcatatatttgttgagggcaaaagactatggactggaaggcagaaagtgggatcctggccccactctgcctttcctattgagcaaccagctctgggctcagtttcctcacctggagggttggacccactcacctccactctagccccgaaccctcctgccccaggcttccaggccccatcaggcctgccctgagttggccttgtccactccttgaggcagatcctggcactacctcacagctccctggggacggccactccctggctgagggccctcccctcccctctgcctgtccggaacgggaggctgaaatggaaaagctgccttggccctgcttggctgagtcacaaggggcagtgggctcttgggtgctgttccaccctgaccctggctcacccctcttcctaggcctgggggcaggcagttcctaccatgtacccctctcaggctgcctgcctgacaaggtcagcatcatttgctctcctgaatttatgaggtttatttatttttctctttcctactcctattaaagaacctcgtcccagtgaaa

SEQ ID NO: 365 - DNA, 3859 bp, Homo Sapiens
aatctatcagggaacggcggtggccggtgcggcgtgttcggtgcgctctggccgctcaggccgtgcggctgggtgagcgcacgcgaggcggcgaggcggcaagcgtgtttctaggtcgtggcgtcgggcttccggagctttggcggcagctaggggaggatggcggagtcttcggataagctctatcgagtcgagtacgccaagagcgggcgcgcctcttgcaagaaatgcagcgagagcatccccaaggactcgctccggatggccatcatggtgcagtcgcccatgtttgatggaaaagtcccacactggtaccacttctcctgcttctggaaggtgggccactccatccggcaccctgacgttgaggtggatgggttctctgagcttcggtgggatgaccagcagaaagtcaagaagacagcggaagctggaggagtgacaggcaaaggccaggatggaattggtagcaaggcagagaagactctgggtgactttgcagcagagtatgccaagtccaacagaagtacgtgcaaggggtgtatggagaagatagaaaagggccaggtgcgcctgtccaagaagatggtggacccggagaagccacagctaggcatgattgaccgctggtaccatccaggctgctttgtcaagaacagggaggagctgggtttccggcccgagtacagtgcgagtcagctcaagggcttcagcctccttgctacagaggataaagaagccctgaagaagcagctcccaggagtcaagagtgaaggaaagagaaaaggcgatgaggtggatggagtggatgaagtggcgaagaagaaatctaaaaaagaaaaagacaaggatagtaagcttgaaaaagccctaaaggctcagaacgacctgatctggaacatcaaggacgagctaaagaaagtgtgttcaactaatgacctgaaggagctactcatcttcaacaagcagcaagtgccttctggggagtcggcgatcttggaccgagtagctgatggcatggtgttcggtgccctccttccctgcgaggaatgctcgggtcagctggtcttcaagagcgatgcctattactgcactggggacgtcactgcctggaccaagtgtatggtcaagacacagacacccaaccggaaggagtgggtaaccccaaaggaattccgagaaatctcttacctcaagaaattgaaggttaaaaagcaggaccgtatattccccccagaaaccagcgcctccgtggcggccacgcctccgccctccacagcctcggctcctgctgctgtgaactcctctgcttcagcagataagccattatccaacatgaagatcctgactctcgggaagctgtcccggaacaaggatgaagtgaaggccatgattgagaaactcggggggaagttgacggggacggccaacaaggcttccctgtgcatcagcaccaaaaaggaggtggaaaagatgaataagaagatggaggaagtaaaggaagccaacatccgagttgtgtctgaggacttcctccaggacgtctccgcctccaccaagagccttcaggagttgttcttagcgcacatcttgtccccttggggggcagaggtgaaggcagagcctgttgaagttgtggccccaagagggaagtcaggggctgcgctctccaaaaaaagcaagggccaggtcaaggaggaaggtatcaacaaatctgaaaagagaatgaaattaactcttaaaggaggagcagctgtggatcctgattctggactggaacactctgcgcatgtcctggagaaaggtgggaaggtcttcagtgccacccttggcctggtggacatcgttaaaggaaccaactcctactacaagctgcagcttctggaggacgacaaggaaaacaggtattggatattcaggtcctggggccgtgtgggtacggtgatcggtagcaacaaactggaacagatgccgtccaaggaggatgccattgagcagttcatgaaattatatgaagaaaaaaccgggaacgcttggcactccaaaaatttcacgaagtatcccaaaaagttttaccccctggagattgactatggccaggatgaagaggcagtgaagaagctcacagtaaatcctggcaccaagtccaagctccccaagccagttcaggacctcatcaagatgatctttgatgtggaaagtatgaagaaagccatggtggagtatgagatcgaccttcagaagatgcccttggggaagctgagcaaaaggcagatccaggccgcatactccatcctcagtgaggtccagcaggcggtgtctcagggcagcagcgactctcagatcctggatctctcaaatcgcttttacaccctgatcccccacgactttgggatgaagaagcctccgctcctgaacaatgcagacagtgtgcaggccaaggtggaaatgcttgacaacctgctggacatcgaggtggcctacagtctgctcaggggagggtctgatgatagcagcaaggatcccatcgatgtcaactatgagaagctcaaaactgacattaaggtggttgacagagattctgaagaagccgagatcatcaggaagtatgttaagaacactcatgcaaccacacacagtgcgtatgacttggaagtcatcgatatctttaagatagagcgtgaaggcgaatgccagcgttacaagccctttaagcagcttcataaccgaagattgctgtggcacgggtccaggaccaccaactttgctgggatcctgtcccagggtcttcggatagccccgcctgaagcgcccgtgacaggctacatgtttggtaaagggatctatttcgctgacatggtctccaagagtgccaactactaccatacgtctcagggagacccaataggcttaatcctgttgggagaagttgcccttggaaacatgtatgaactgaagcacgcttcacatatcagcaggttacccaagggcaagcacagtgtcaaaggtttgggcaaaactacccctgatccttcagctaacattagtctggatggtgtagacgttcctcttgggaccgggatttcatctggtgtgatagacacctctctactatataacgagtacattgtctatgatattgctcaggtaaatctgaagtatctgctgaaactgaaattcaattttaagacctccctgtggtaattgggagaggtagccgagtcacacccggtggctgtggtatgaattcacccgaagcgcttctgcaccaactcacctggccgctaagttgctgatgggtagtacctgtactaaaccacctcagaaaggattttacagaaacgtgttaaaggttttctctaacttctcaagtcccttgttttgtgttgtgtctgtggggaggggttgttttggggttgtttttgttttttcttgccaggtagataaaactgacatagagaaaaggctggagagagattctgttgcatagactagtcctatggaaaaaaccaaagcttcgttagaatgtctgccttactggtttccccagggaaggaaaaatacacttccacccttttttctaagtgttcgtctttagttttgattttggaaagatgttaagcatttatttttagttaaaataaaaactaatttcatactatttagattttcttttttatcttgcacttattgtcccctttttagttttttttgtttgcctcttgtggtgaggggtgtgggaagaccaaaggaaggaacgctaacaatttctcatacttagaaacaaaaagagctttccttctccaggaatactgaacatgggagctcttgaaatatgtagtattaaaagttgcatttg

SEQ ID NO: 366 - DNA, 1080 bp, Homo Sapiens
atgactcctgtgaggatgcagcactccctggcaggtcagacctatgccgtgcccttcatccagccagacctgcggcgagaggaggccgtccagcagatggcggatgccctgcagtacctgcagaaggtctctggagacatcttcagcaggtggcaggtagagcagagccggagccaggtgcaggccattggagagaaggtctccttggcccaggccaagattgagaagatcaagggcagcaagaaggccatcaaggtgttctccagtgccaagtaccctgctccagggcgcctgcaggaatatggctccatcttcacgggcgcccaggaccctggcctgcagagacgcccccgccacaggatccagagcaagcaccgccccctggacgagcgggccctgcaggagaagctgaaggactttcctgtgtgcgtgagcaccaagccggagcccgaggacgatgcagaagagggacttgggggtcttcccagcaacatcagctctgtcagctccttgctgctcttcaacaccaccgagaacctgtacaagaagtatgtcttcctggaccccctggctggtgctgtaacaaagacccatgtgatgctgggggcagagacagaggagaagctgtttgatgcccccttgtccatcagcaagagagagcagctggaacagcaggtcccagagaactacttctatgtgccagacctgggccaggtgcctgagatccatgttccatcctacctgcctgacctgcccggcattgccaacgacctcatgtacagtgccgacctgggccccggcattgccccctctgcccctggcaccattccagaactgcccaccttccacactgaggtagccgagcctctcaaggtagtgagagccacgagccaaggtgggcacttgatgtcggatctcttcaacaagctggtcatgaggcgcaagggcatctctgggaaaggacctggggctggtgaggggcccggaggagcctttgtccgcgtgtcagactccatccctcctttgccgccaccgcagcagccacaggcagaggaggacgaggacgactgggaatcgtag

SEQ ID NO: 367 - DNA, 2833 bp, Homo Sapiens
ggcctggccggggcgggcggcgcgggggcggcatgagggcccgcggcccggggggctgaggcgcccgccgcctgccgcgggggccgctcgcgtcctccatggaggccggagaggaaccgctgctgctggccgaactcaagcccgggcgcccccaccagtttgattggaagtccagctgtgaaacctggagcgtcgccttctccccagatggctcctggtttgcttggtctcaaggacactgcatcgtcaaactgatcccctggccgttggaggagcagttcatccctaaagggtttgaagccaaaagccgaagtagcaaaaatgagacgaaagggcggggcagcccaaaagagaagacgctggactgtggtcagattgtctgggggctggccttcagcccgtggccttccccacccagcaggaagctctgggcacgccaccacccccaagtgcccgatgtctcttgcctggttcttgctacgggactcaacgatgggcagatcaagatctgggaggtgcagacagggctcctgcttttgaatctttccggccaccaagatgtcgtgagagatctgagcttcacacccagtggcagtttgattttggtctccgcgtcacgggataagactcttcgcatctgggacctgaataaacacggtaaacagattcaagtgttatcgggccacctgcagtgggtttactgctgttccatctccccagactgcagcatgctgtgctctgcagctggagagaagtcggtctttctatggagcatgaggtcctacacgttaattcggaagctagagggccatcaaagcagtgttgtctcttgtgacttctcccccgactctgccctgcttgtcacggcttcttacgataccaatgtgattatgtgggacccctacaccggcgaaaggctgaggtcactccaccacacccaggttgaccccgccatggatgacagtgacgtccacattagctcactgagatctgtgtgcttctctccagaaggcttgtaccttgccacggtggcagatgacagactcctcaggatctgggccctggaactgaaaactcccattgcatttgctcctatgaccaatgggctttgctgcacattttttccacatggtggagtcattgccacagggacaagagatggccacgtccagttctggacagctcctagggtcctgtcctcactgaagcacttatgccggaaagcccttcgaagtttcctaacaacttaccaagtcctagcactgccaatccccaagaaaatgaaagagttcctcacatacaggactttttaagcaacaccacatcttgtgcttctttgtagcagggtaaatcgtcctgtcaaagggagttgctggaataatgggccaaacatctggtcttgcattgaaatagcatttctttgggattgtgaatagaatgtagcaaaaccagattccagtgtactagtcatggatctttctctccctggcatgtgaaagtcagtcttagaggaagagattccacttgcacggcaacagagccttacgttaaattttcagtccagttatgaacagcaagtgttgaactctttctgcttgttttgattcaaagtgcagttactgatgttgttttgattatgcaactaagtaggcctccagagcctctctagtggcagagcagctcacactccctccgctgggaacgatggcttctgcctagtacctatccttgtgtttctgatgcagtggtagcattggttcaagttctctcctgctgtggtcagagttgcttcgatgttggccaagtgcttttcttcttgggctcccttctgacctgcaggacagttttcctggagccatttggtatgaggtattaatttagcttaactaaattacaggggactcagaggccgtgctcctgaccgatccagacactattactggctttttttttttttttttaacaatggtgtgcatgtgcaggaaatgacaaatttgtatgtcagattatacaaggatgtattcttaaaccgcatgactattcagatggctactgagttatcagtggccatttattagcatcatatttatttgtattttctcaacagatgttaaggtacaactgtgtttttctcgattatctaaaaaccatagtacttaaattgaacagttgcaaagatgtcttaattgtgtaaagaattggtgtagtcatgactttagctgatactcttatgtacgagatctgtctctgctgtttaacttcattggattaatcagctggtttcaactctactgcgaaacaaaaatagctccttaaaagtactgttctccttcagtggcatgtagttatctaatcaagacacctcattcaaacaaaacctgccttaggaaaatttaatatattttaaattattttaaaagaaatacaacatcttattctttagctttcttaatcggtgctttatggaggccagtgtaacgttacatgactcgttgagaaagttgaggaatttcctctaccacctttgttgcttgaagaaaaacatgtcttttcaaaatgagaggctttcattgaagaaaagaaaaaaacaacagttaaaagcttttggctctctgtttcatttttttccattaagaaaaaaaaaagtccccttttaaaacaagcagggctgggtgtgacggcacatgcctgtaatcccagcactttgggaggctgaggtgggaggactgcttgagcccaggagttcaagatcagcctgggcaacagagtgagataagacccaatctttatttaaaaaataaataaataaatagccaaaaaaaaaaaaaaaaaa

SEQ ID NO: 368 - DNA, 1860 bp, Homo Sapiens
atgagccatcctgactacagaatgaacctccggtccctggggacccacagaggtgtgtctgctgtggctggtccacatgacattggtgcttcgccaggtgacaaaaagtcaaagaacaggtccacacgagggaagaaaaagagcatatttgaaacttacatgtccaaggaggatgtttcagaaggcttgaagagaggaacactcatccagggtgtattgagaattaatccaaagaagtttcatgaagccttcattccttccccggatggtgatcgagacatttttattgatggggttgttgctcgtaatagagccttaaatggggatctggtggtcgtgaaactgcttcccgaggagcattggaaggtagttaaaccagagagcaatgacaaagaaacagaagctgcgtatgaatcagatatccccgaggagctctgtggacaccatctcccgcaacagtccctgaaaagctataatgacagtcctgatgtcattgtagaggctcagtttgatggcagcgactcagaagatggacatggcatcacacaaaatgtgctggttgatggtgttaagaaactctcagtttgtgtttctgagaaaggaagagaggatggtgatgcaccggttacaaaagatgagaccacctgcatttcacaagacacaagagctttatcggagaaatccctgcaaagatcagcaaaggtggtttacatcttggagaaaaaacattctcgagcagcaaccggcttcctcaaactcttggctgataagaacagcgaactgtttaggaaatacgccctgttttctccctcagaccaccgagtgcctagaatttatgtgcctctcaaggactgtccccaggactttgtggcacggcctaaagattatgccaacacactgttcatctgccgcattgtggactggaaggaggactgcaattttgccctggggcagctggctaagagtcttgggcaggctggtgaaattgagcctgaaacagaaggaatactaacagagtatggcgtggatttctctgatttctcttcagaagttctagaatgtcttcctcaaggcctgccatggacaattccaccagaggagttcagcaagagaagggatttaagaaaagactgtatcttcaccattgacccatcaaccgcccgagacctcgatgatgccctctcctgcaagccactcgctgacggcaacttcaaagtgggagttcacattgctgacgtgagttactttgttccggagggatctgatctggataaagtggctgccgagagggctacaagcgtctacttggttcaaaaggtggtccccatgcttcccaggctgctgtgtgaggagctgtgcagcctcaaccccatgtccgacaagctgaccttctctgtgatctggacactgactccagagggcaagatccttgatgaatggtttggccggaccatcatccgctcctgcaccaaacttagctacgagcatgcacagagcatgattgaaagcccaactgagaaaatccctgcgaaagagctgccccccatttccccagagcatagcagcgaggaggtacaccaggccgtcttgaatctccacggaattgccaagcagttacgccagcagcgctttgtggacggcgcacttcgtttggatcagctaaagcttgctttcactctggaccacgagaccggattgcctcaaggatgtcatatctatgagtaccgcgagagcaacaagccctgctgcgccggcaccccccgccccaaacaaggatgctcagtgacctggtggaattctgcgaccagatggggctgcccgtggacttcagctccgcaggagccctcaataaaagcctga

SEQ ID NO: 369 - DNA, 1554 bp, Homo Sapiens
gcgcgcctcgccggcgcctccatcccggatccttgctgcagcgtcagcgccgccgcccgtgcctttcctcttcctcctcctcctccttggcatccgcctcttcttcctcctgcgtcctcccccgctgcctccgctgctcccgacgcggagcccggagcccgcgccgagcccctggcctcgcggtgccatgctgccccggcggcggcgctgaaggatggcgacgccgctgcctccgccctccccgcggcacctgcggctgctgcggctgctgctctccggcctcgtcctcggcgccgccctgcgtggagccgccgccggccacccggatgtagccgcctgtcccgggagcctggactgtgccctgaagaggcgggcaaggtgtcctcctggtgcacatgcctgtgggccctgccttcagcccttccaggaggaccagcaagggctctgtgtgcccaggatgcgccggcctccaggcgggggccggccccagcccagactggaagatgagattgacttcctggcccaggagcttgcccggaaggagtctggacactcaactccgcccctacccaaggaccgacagcggctcccggagcctgccaccctgggcttctcggcacgggggcaggggctggagctgggcctcccctccactccaggaacccccacgcccacgccccacacctccatgggctcccctgtgtcatccgacccggtgcacatgtcgcccctggagccccggggagggcaaggcgacggcctcgcccttgtgctgatcctggcgttctgtgtggccggtgcagccgccctctccgtagcctccctctgctggtgcaggctgcatcgtgagatccgcctgactcagaaggccgactacgccactgcgaaggcccctggctcacctgcagctccccggatctcgcctggggaccaacggctggcacagagcgcggagatgtaccactaccagcaccaacggcaacagatgctgtgcctggagcggcataaagagccacccaaggagctggacacggcctcctcggatgaggagaatgaggacggagacttcacggtgtacgagtgcccgggcctggccccgaccggggaaatggaggtgcgcaaccctctgttcgaccacgccgcactgtccgcgcccctgccggcccccagctcaccgcctgcactgccatgacctggaggcagacagacgcccacctgctccccgacctcgaggcccccggggaggggcagggcctggagcttcccactaaaaacatgttttgatgctgtgtgcttttggctgggcctcgggctccaggccctgggaccccttgccagggagacccccgaacctttgtgccaggacacctcctggtcccctgcacctctcctgttcggtttagacccccaaactggagggggcatggagaaccgtagagcgcaggaacgggtgggtaattctagagacaaaagccaattaaagtccatttcagaaaaaaaaaaaaaaaaaaaaaaaaaaaaaaaaaaaaaaaaaaaaaaaaaaaaaaaaaaaaa

SEQ ID NO: 370 - DNA, 957 bp, Homo Sapiens
gtggagtaaaatggctgccgcctgggggtcgtccctaacggccgcgacgcagagagcggtcactccctggccgaggggcaggctcctcacggcctccctgggaccccaggcgcgtcgggaggcgtcgtcctccagccccgaggccggcgaagggcagatctgcctcacagacagttgcgtccagaggcttttggaaatcaccgaagggtcagaattcctcaggctgcaagtggagggaggtggatgctccggattccaatacaaattttcactggatacagttatcaaccccgacgacagggtatttgaacagggtggggcaagagtggtggttgactctgatagcttggccttcgtgaaaggggcccaggtggacttcagccaagaactgatccgaagctcatttcaagtgttgaacaatcctcaagcacagcaaggctgctcctgtgggtcatctttctctatcaaactttgatgtgatgactggtgactctgggattgtcaccagttgtaccaatttgaagaacgtggaattagtagaattctagaagtttacttctaatcatgtccctctcaattttatttcccgcagtccaggagtgttatgttttgccactattattttcagaatgtgaagattttactcttggcttaatttttccctccactcagtgctaaggctgagcctccagatgctgttacctcagatttaatcactggttgaaactccgtataatctgtagagcctccatggctctaaaatttggaattaacttctcttgccttaagagctgcttgtacatatgtggatagctatgtataaaagcttcattttaaagaaggttcttattgtgttgtggatcagggtcacagattgggtagcttggacaccagttattagaggatgagaaaagtaaatgaaatgttctctttttcacttcaaaaaaaaaaaaaaaa

SEQ ID NO: 371 - DNA, 1311 bp, Homo Sapiens
ccgccgctgccgctgccgctgtcgctgtcgccgccgccgccgcccgccgccgccgccgccgccgccgccgctgccatggctcaatacaagggcgccgcgagcgaggccggccgcgccatgcacctgatgaagaagcgggagaagcagcgcgagcagatggagcagatgaagcagcgcatcgcggaggagaacatcatgaaatccaacattgacaagaagttctctgcgcactacgacgcggtggaggcagagctcaagtccagcaccgtgggtctcgtgaccctgaatgacatgaaggccaagcaggaggctctggtgaaggagcgggagaagcagctggccaagaaggagcagtccaaggagctgcagatgaagctggagaagcttcgagagaaggagcgtaagaaggaagccaagcggaagatctccagcctgtccttcaccctggaggaggaagaagagggaggcgaggaggaagaggaggcggccatgtatgaggaggagatggaaagggaagagatcaccacgaagaagagaaaactggggaagaacccagacgttgacacaagcttcttgcctgatcgagaccgtgaggaggaggagaatcggcttcgggaagagctgcggcaggagtgggaagccaagcaggagaagatcaagagtgaggagatcgagatcaccttcagctactgggatggctctgggcaccggcggacagtcaagatgagaaagggcaacaccatgcagcagttcctgcagaaggcgctcgagatccttcggaaagacttcagtgagctgaggtccgcaggggtggagcagctcatgtacatcaaggaggacttgatcatccctcaccatcacagcttctacgacttcatcgtcaccaaggcacgggggaagagtggaccactcttcaactttgatgttcatgacgatgtgcggttgctcagtgacgccactgtggagaaggatgagtcccatgcaggcaaggtggtgctgaggagctggtacgagaagaacaagcacatctttcccgccagccgctgggaaccctacgaccctgaaaagaagtgggacaagtacacgatccgctgagcatccaggaggctgcgcggccccggctcctcagctccctcagtgtgccccgtggtgtcaccgggactccaggcacccgctcccctgcgaccatgccaggcacgctgggaggaggacggcagctgctcgtgtcctgcccctgccacatcagtgactgctttattcttttccaataaagaagtgcacgtgtcagagctggagcgcctgcattgtgag

SEQ ID NO: 372 - DNA, 962 bp, Homo Sapiens
cttcttttccgacaaaacaccaaatggcggatgacgccggtgcagcgggggggcccgggggccctggtggccctgggatggggaaccgcggtggcttccgcggaggtttcggcagtggcatccggggccggggtcgcggccgtggacggggccggggccgaggccgcggagctcgcggaggcaaggccgaggataaggagtggatgcccgtcaccaagttgggccgcttggtcaaggacatgaagatcaagtccctggaggagatctatctcttctccctgcctattaaggaatcagagatcattgatttcttcctgggggcctctctcaaggatgaggttttgaagattatgccagtgcagaagcagacccgtgccggccagcgcaccaggttcaaggcatttgttgctatcggggactacaatggccacgtcggtctgggtgttaagtgctccaaggaggtggccaccgccatccgtggggccatcatcctggccaagctctccatcgtccccgtgcgcagaggctactgggggaacaagatcggcaagccccacactgtcccttgcaaggtgacaggccgctgcggctctgtgctggtacgcctcatccctgcacccaggggcactggcatcgtctccgcacctgtgcctaagaagctgctcatgatggctggtatcgatgactgctacacctcagcccggggctgcactgccaccctgggcaacttcgccaaggccacctttgatgccatttctaagacctacagctacctgacccccgacctctggaaggagactgtattcaccaagtctccctatcaggagttcactgaccacctcgtcaagacccacaccagagtctccgtgcagcggactcaggctccagctgtggctacaacatagggtttttatacaagaaaaataaagtgaattaagcgtgaaaaaaaaaaaaaaaaaaaa

SEQ ID NO: 373 - DNA, 820 bp, Homo Sapiens
gggagagcctggggccgggccgtgtggatgccatccccgagcgcggttcgcgctcggctgaggcgctggacaagtggcttgggctcccgcgcctcagtttctctctgtggcgccgcctacctcacagacttgtgagcactcactgacgtgggtagcgcccagggcctgcggggcgcaggagagctggagtcaggcggagaccgcaggctgaccccgcagcggccgggctgtcgcggcccccacctcaggtaaccatgtgcgaccgaaaggccgtgatcaaaaatgcggacatgtcggaagagatgcaacaggactcggtggagtgcgctactcaggcgctggagaaatacaacatagagaaggacattgcggctcatatcaagaaggaatttgacaagaagtacaatcccacctggcattgcatcgtggggaggaacttcggtagttatgtgacacatgaaaccaaacacttcatctacttctacctgggccaagtggccattcttctgttcaaatctggttaaaagcatggactgtgccacacacccagtgatccatccaaaaacaaggactgcagcctaaattccaaataccagagactgaaattttcagccttgctaagggaacatctcgatgtttgaacctttgttgtgttttgtacagggcattctctgtactagtttgtcgtggttataaaacaattagcagaatagcctacatttgtatttattttctattccatacttctgcccacgttgttttctctcaaaatccattcctttaaaaaataaatctgatgcagatgtgtaaaaaaaaaaaa

SEQ ID NO: 374 - DNA, 583 bp, Homo Sapiens
tagccgggcgtggtggcggtaattcgccaaaatgacgaacacaaagggaaagaggagaggcacccgatatatgttctctaggccttttagaaaacatggagttgttcctttggccacatatatgcgaatctataagaaaggtgatattgtagacatcaagggaatgggtactgttcaaaaaggaatgccccacaagtgttaccatggcaaaactggaagagtctacaatgttacccagcatgctgttggcattgttgtaaacaaacaagttaagggcaagattcttgccaagagaattaatgtgcgtattgagcacattaagcactctaagagccgagatagcttcctgaaacgtgtgaaggaaaatgatcagaaaaagaaagaagccaaagagaaaggtacctgggttcaactaaagcgccagcctgctccacccagagaagcacactttgtgagaaccaatgggaaggagcctgagctgctggaacctattccctatgaattcatggcataataggtgttaaaaaaaaaaataaaggacctctgggctacaaaaaaaaaaaaaaaaaagaatgaactttca

SEQ ID NO: 375 - DNA, 5833 bp, Homo Sapiens
ggaaggagatggtgctcttcttttttctttctgaattgtggccaccttcataccagtctgtcatggaacacttaagccgcttgagtgcctgctggtactcccagccctgccatgcctgagccccctgcacacaaggagccaggagtaatcagggcagacccattagggcacggggacttctggattgtgaaattggctctctgggggccaaggccttctaacgttggtggaagtggctttggcttattgggtcggattctaggccattcgttccaacctttagagacatcccagctttccctagcccagagtctgcagcccctccaccatcccacatcctccccctccctttcctcatgaaccccagtcgcgcctctgccttctcaaacccctccaccatcccacaccctcctcctgcccttcctcatgaaccccagtcacgcctctgccttctcatccctgcgcgccacacaggctcgctcgtgcccggtgaatgctgaggctgctctgcacgtggagtgtggccctgtgggcaagggctgggctcttggaggtaggggagctacaggggcgactgggaggaggatgttgtgttacacacgcatcagagttaactttgcagtgagagcagccttgctgcggccaaagaacatggaaaagcatgagtggggtgatgtgccttaaagcatcagacacttgggcctcgggcatcaggagccagccacagggatgtctggggaaatggcgttccatgagatgcaagcacacaagaatgcacttggcacatctggggaacagcaggcagctgatatcactgggcccaccccgcaccagggaggatggaagcaggatctcccagcaggtagagcagagccggagccaggtgcaggccattggagagaaggtctccttggcccaggccaagattgagaagatcaagggcagcaagaaggccatcaaggtgttctccagtgccaagtaccctgctccagagcgcctgcaggaatatggctccatcttcacgggcgcccaggaccctggcctgcagagacgcccccgccacaggatccagagcaagcaccgccccctggacgagcgggccctgcaggagaagctgaaggactttcctgtgtgcgtgagcaccaagccggagcccgaggacgatgcagaagagggacttgggggtcttcccagcaacatcagctctgtcagctccttgctgcttttcaacaccaccgagaacctgtacaagaagtatgtcttcctggaccccctggctggtgctgtaacaaagacccatgtgatgctgggggcagagacagaggagaagctgtttgatgcccccttgtccatcagcaagagagagcagctggaacagcaggtcccagagaactacttctatgtgccagacctgggccaggtgcctgagattgatgttccatcctacctgcctgacctgcccagcattgccaacgacctcatgtacagtgccgacctgggccccggcattgccccctctgcccctggcaccattccggaactgcccaccttccacactgaggtagccgagcctctcaaggcagacctacaagatggggtactaacaccacccccaccgcccccaccaccacccccagctcctgaggtgctggccagtgcacccccactcccaccctcaaccgcggcccctgtaggccaaggcgccaggcaggacgacggcagcagcagcgcgtctccttcagtccagggagctcccagggaagtggtcgacccctccggtggctgggccactctgctagagtccatccgccaagctgggggcatcggcaaggccaagctgcgcagcatgaaggagcgaaagctggagaagaagaagcagaaggagcaggagcaagtgagagccacgagccaaggtgggcacttgatgtcggatctcttcaacaagctggtcatgaggcgcaagggcatctctgggaaaggacctggggctggtgaggggcccggaggagcctttgcccgcgtgtcagactccatccctcctgtgcccccaccgcaacagccacaggcagaggaggacgaggacgactgggaatcctagggggctccatgacaccttcccccccagacccagacttgggctgttgctctgacatggacacagccaggacaagctgctcagacctgcttccctgggagggggtgacggaaccagcactgtgtggagaccagcttcaaggagcggaaggctggcttgaggccacacagctggggcggggacttctgtctgcctgtgctccatggggggacggctccacccagcctgcgccactgtgttcttaagaggcttccagagaaaacggcacaccaatcaataaagaactgagcagaaaccaacagtgtgcttttaataaaggacctctagctgtgcaggatgcaaacgtctcggggtcagtgactgcctcctgcccctgttggtccctaggcagtgggggcagaagctcccagctgacctgtttctctgggagagaagggcagtcagcaggggcagctgttgcagatgggaggaatagtctcccacaaaaaaggtttcagtgacagacacggggtctctaaaaatagtcatgctgagagcccaatggcccttggcacaattgctggtgttggggtagaagatgtcttggagtttgctcaagtggttgagagggagggaggtgccatcaacttggaggaactggcaccaagccagggagatagaaatccaggcaaggctgtggggcaggttagggagcaaggctgcaggggtgactcaggaagaaggtgggggaggtgacaagcccccaggcaggggccctgtggccatggggatctttttaaattgagactagggggtgaatagtccagggcagctaactttagttattatagaaagggcagtagcagatgggtctgctccgtctcgcttctaagaaggtgggcaggacaaatggcagcctcctgcagaggcccagtgagaagcctggccctcggccacacaggatggaagacagattggattccacagaggggagctgccctgggaagatctcacggatggccaggacccaccatttcttcggggttcccctgttttctccaacgggcactaatgcctgtgcctgggtcctggcaacactctggactccacactcttctgggtttcacctttgtagcaggatccctgcagatcaggcccatgacaaacaccgtctccagcgggcagagcaaaggaagggcgcagcgccaggcagtggtgcagctgcctgtcaggaagaggcctacttctggtgaaactgggcagacaaaaggcagtgagaaatgtgatctcggggtggtggaggctctagggaaaggaaaaggcaggagtgaacttccacacagcagcaatggcagaaccaaaggtggctttgacctccacgagggctcagatccaggccaacagcttgtccaggacagggtgccgggtgtatcactaatccaggagcactatgctggcagaatccctttggtgcctgatggccctgccttcgtgggaacagaggctaaggctttgagttacagctgcctccccaacagtgcatccccttctccttcctcagcctcaggtaggagacagggcaggcaacccccctttcctcttctccccttctccagcccctgtctgtccacccagctggaggcagccaggcttgcctatggactggttgacagccttcatgcacaggttctccaccagagcctttcttgggggcccctggctgggctctgagctgggagtgaaggggatgacccatgcggactgtttgctgcttgtagctttccctgggaaagactctgccaggccttggagccagaccaggaggctttataggccactgcaagcagcagggctccagatgacatcacagggaatatcaagagggtgtggaggggcatcgaagcctctccaggagacaggagacgccggcccagtagagccctaggggcgacgccactcccactcactgtctactctcctctcacctctgcaacactggggacactcacaagattgtgatccaagtcggccgtcgtcttctgcagctctggagacctgatgctggggaagggcatgcctggcatcaccacacacctgggaggagacaggagcctggggccggtgggcccacacatcaccagctgctccgttctaccatttcttcagccctcttggctgtgcctgcggctctgcccctcccctctctgcacctaccacccagagagggcttgttgagctcagagatcccacctaggccaatccactgggttctgtggcagcgatggcctgcctgatcttccacctgctctcccagggccaaagccagacctgctgagcccctccctccagccggctggtctgagcagtcacagcccggctttgggctccgatggcagcagatggcaggtaggggtccagctgctggagcgagggccggccacgtatcacagccaaggagatgagcacaagcactacttactggcctaggttgtcagagaagttgatgctctcactcatctttcctccaatctttcccctatgcctggttgtggtattaagttacatgcagacaacaggggccagaagatgaacaatggcccatcccactctaggcatggctcctctccacaggaaaactccactccagtgctcagcttgcaccctggcacaggccagcagttgctggaagtcagacacctgcagatcaagaccacagcatcaagaccctgtgacctctcaaaggcctggtggaaaggacacgggaagtctgggctaagagacagcaaatacacatgaacagaaagaagaggtcaaagaaaaggctgacggcaagttaacaaaaagaaaaatggtgaatgatacccggtgctggcaatctcgtttaaactacatgcaggaacagcaaaggaaatccggcaaatttgcgcagtcattctcaacaccggccatgcagcaaaatcatcagtggaaatttaaaaaaatacacgtggccaggccccagcccaaatcactaataagaatctccagggcttcacctgttagactggcaaaaaatccaaaagtaaacactttgtggagaaacaggcactcctagacattgctggtgggatacagaacagtacaattctgatggtaatcagttaacaaattaaacatatttattttatacttttaaacccaggaatcccatatttaggagtctactgagaccaaacagcatatgctcctggtgtttccctataatccgccactactgttggagcaagagggcccagcagtgtccccagctgccagcaggcgggcgtgctgccagtacaccttgagcaagaggaccctgcaatgtccgtagctgccagcaggcggcgtgccaccactatacagtaagcaagaggaccctgcagtgccccggcgccacgagggggcggtggccaccactctaagcaagagagccctgcagttgccctagtcgccagcagggggcgccctggcacagcaccgtgagcaagcgggtcctgtagtgcccggctgcaagcaaggggcggtcgatcccggcttttcggattactgaagttccacccgtctctgcgccgcgccgccgtgacgtgagtttctgcgcgtgcacggcgcccccgcacccccccgcccccagcccggcgccgtgcgactttgctcctgcaacacacgcacccccaacccccgcccgtaggcgtgcgtctctgcgcctgcgccacgcctccacccctggacgcgctagcatgt

SEQ ID NO: 376 - DNA, 1677 bp, Homo Sapiens
aggttctcttacatcgaccgcctaagagtcgcgctgtaagaagcaacaacctctcctcttcgtctccgccatcagctcggcagtcgcgaagcagcaaccatgcgtgagtgcatctccatccacgttggccaggctggtgtccagattggcaatgcctgctgggagctctactgcctggaacacggcatccagcccgatggccagatgccaagtgacaagaccattgggggaggagatgattccttcaacaccttcttcagtgagacgggggctggcaagcatgtgccccgggcagtgtttgtagacttggaacccacagtcattgatgaagttcgcactggcacctaccgccagctcttccaccctgagcaacttatcacaggcaaagaagatgctgccaataactatgcccgagggcactacaccattggcaaggagatcattgacctcgtgttggaccgaattcgcaagctggccgaccagtgcacgggtctccagggcttcttggttttccacagctttggtgggggaactggttctgggttcacctcgctgctcatggaacgtctctcagttgattatggcaagaagtccaagctggagttctctatttacccggcgccccaggtttccacagctgtagttgagccctacaactccatcctcaccacccacaccaccctggagcactctgattgtgccttcatggtagacaatgaggccatctatgacatctgtcgtagaaacctcgatattgagcgtccaacctatactaacctgaataggttaataggtcaaattgtgtcctccatcactgcttccctgagatttgatggagccctgaatgttgacctgacagaattccagaccaacctggtgccctatccccgcatccacttccctctggccacatatgcccctgtcatctctgctgagaaagcctaccatgaacagctttctgtagcagagatcaccaatgcttgctttgagccagccaaccagatggtgaaatgtgaccctcgccatggtaaatacatggcttgctgcctgttgtaccgtggtgacgtggttcccaaagatgtcaatgctgccattgccaccatcaagaccaagcgtaccatccagtttgtggattggtgccccactggcttcaaggttggcatcaactaccagcctcccactgtggtgcctggtggagacctggccaaggtacagagagctgtgtgcatgctgagcaacaccacagccattgctgaggcctgggctcgcctggaccacaagtttgacctgatgtatgccaaacgtgcctttgttcactggtacgttggggaggggatggaggaaggtgagttttcagaggcccgtgaggacatggctgcccttgagaaggattatgaggaggttggtgtggattctgttgaaggagagggtgaggaagaaggagaggaatactaaagttaaaacgtcacaaaggtgctgcttttacagggaagcttattctgttttaaacattgaaaagttgtggtctgatcagttaatttgtatgtagcagtgtatgctctcatatacaattactgacctatgctctaaaacatgaatgctttgttacagacccaagctgtccatttctgtgatgggttttgaataaagtattccctgtcttaaaaaaaaaaaaaa

SEQ ID NO: 377 - DNA, 1980 bp, Homo Sapiens
atcctcaccttccctcgccttcctgttcctggcggagccgggctccgctcgtcttctctgtcttagggctggtgctggccctgcccacgcctagggctccggcgcgtcacgggcctcagctgggattcccgcgcccctcggacggccacgagactcggacatctttccaggaacagcgtgaggaggacagaagcacccaacaggactgctcaagccacctgcgaacactgctgctaccatgcccaagagaaaggcaaaaggagatgctaaaggtgataaagcaaaggtgaaggatgagccacagaggagatcagctcggttgtctgctaaaccagctcctccaaaaccagagcccaggcctaaaaaggcctctgcaaagaagggagagaagcttcccaaagggagaaaggggaaagcagatgctggaaaggatgggaacaaccctgcaaaaaaccgagatgcctctacactccagtcccagaaagcggaaggcactggggatgccaagtgaaatgtacatttttgagagctctgtacttatagtgactctactgtttgaaatactatttttttaaatcaagttttataaaagtgtagaattttggcttttttaagttatgttgttagcacacaggacacttccttgttgtcttttgtggaaagggcaagtaccactaatagggtgtatctcagaaactgaattgaaataagggaaaataggattttctgtcctggtttttgaagattgttcttgattcccttgattcccaggagagattctctgacattcacgtgtcagccactttggcacggaagccttacagtgtggggaaccaaaacttcgtgtctcccctttccccgatgccatcagcatagacttgacttccttaaaccgagagttttgatgtggccttggcaaccctaaaatcagctgtgttaggtaacaaaactcaggctttctgttgatgacatcgagatggtgtcacttaaaagagccaagattcctgttttcagtttgtggattcatcctgctggttttactttagtccctccatgtcaaagtgggcctgagaaaagctcatacatgcctcatgtgaagtgtccaccctctctgaaaatctttcttgttcaaaacagcaacgacatatcttgttaacttttacggtgacttttggaggaggggagtttggaaattgtaaaatgttatagattgttgcctatttcctgctgaaagtaaatgtttttaaaaagtatcatataaagctgaatacaaattggtttggggggagatcctttcctacccaaagtcataaatatattctttactgccttgtggaaattttatagttttgcctttcacatttgtctttagtctgtcctgaactgatttttgtgaaaattatgagttagaaattcaacttaacatttttcatattcgaagtggttgtctctgcactatttactgaaaagttcatcctttccccagtgatttgtaacactgcctctttcataaattaaatttttgtgtatgtgtgtgggtcttttgatggtttctattctgactgacatcaatttgtctaatcttgtagcagtacagtacagtcctgattattgcaactttaggaaaaggtctgataaaaaccaagatgcctccacattttgtcataattgtaaccaatttcacctctgtctccagtatcaccacaaaattgttcttccttggagtgtcttggctattcttagccaactgttcctccatattacttctagaattagaccaacaatttataaatcaaacaaacccaagagcattgaaattttgattggatttgtattgaatttatagattaatctggtaaaccatgtcatctttacaatgttgtcttccaatacatgaatatggtacagctcttcatttacttaggcctttgaaatatctttcaataaagtttataattttctccataaaaaaaaaaaaaa

SEQ ID NO: 378 - DNA, 1397 bp, Homo Sapiens
gcgcgcaaggcaccggtggcagcggcgacggcagctgcgacagcaacccctgctgggccgaaactgggcagagcggagcagacgtctgaagcagcgcgagtgaggcgcgagggtagcgcccgcgcccgggaagacccctcggcgcgaaccggcagcccagccccgggtcccggttcccaaggccccgcctctagggcctggggactaatcggattgagagcgcgccggcccgggccgcgaactcgccaattgcggagggcggtggccaccgcccaatccggagcagacaggtgcgaggtccggaaggcggaggccaatcggcggcggttgcgacctgctggggcaggtctcggccaataaggaggctcgagtgacatcttcgcgcaccaatcgggagtgagggagcattcgtgcccgctcgcccttccggccagacctctatttaccaggggcgtgcagcccgcttgccaatcagagcgcggctgagcggccccgcagccaacccccgaggagcggccggctggcgtccgccgcgcccaggagttggggatgtcctacaaacccatcgcccctgctcccagcagcacccctggctccagcacccctgggccgggcaccccggtccctacaggaagcgtcccgtcgccgtcgggctcagtgccaggagccggcgctcctttcagaccgctgtttaacgactttggaccgccttccatgggctacgtgcaggcgatgaagccacccggcgcccagggctcccagagcacctacacggacctgctgtcagtcatagaggagatgggcaaagagatccggcctacctatgctggcagcaagagcgccatggagcgcctgaagagaggtatcatccatgcccgggccctagtcagagagtgcctggcagagacagagcggaacgcccgcacgtaacaggaagcgcctcggcctcagcgtctggacctatccggccactgcagagcacccgcttctccctggccttcatcccgagttgcactaaccatcctgggcttcctgtcctgtgtcccttggtgggtcccctccaggaaccaaggagtggccctccaggtggcagcactaaggacacccccccacaacaagagttagcagcgaggtccccatgagtcccacccatgacctgccgacagtgttgcccaccggaacttttgtggcccctaccgctcagcccttcccagcacttctcccactttgtcccgagcctccttctcccccagcaggggcacaggcctggcacctccctgccttgtgtcctgagccatagtgactcttttatctgtgtgtcttttgctaaatatgccctttttatattaataaaagatgatttggagttgtgctctcaaaaaaaaaaaaaaaaaaaa

SEQ ID NO: 379 - DNA, 1252 bp, Homo Sapiens
tcgcaacgtcacgggcaagggccgccattttgactgagcaaccctagtgacaggagccgaagcagcagcgcaggttgtccccgtttcccctcccccttcccttctccggttgccttcccgggccccttacactccacagtcccggtcccgccatgtcccagaaacaagaagaagagaaccctgcggaggagaccggcgaggagaagcaggacacgcaggagaaagaaggtattctgcctgagagagctgaagaggcaaagctaaaggccaaatacccaagcctaggacaaaagcctggaggctccgacttcctcatgaagagactccagaaagggcaaaagtactttgactcaggagactacaacatggccaaagccaagatgaagaataagcagctgccaagtgcaggaccagacaagaacctggtgactggtgatcacatccccaccccacaggatctgccccagagaaagtcctcgctcgtcaccagcaagcttgcgggtggccaagttgaatgatgctgcccggggctctgccagatcctgagacgcttcccctccctgccccacccgggtcctgtgctggctcctgccccttcctgcttttgcagccaggggtcaggaggtggctcgggtgtgggctggagaggcagaagccctttcctgttggtgtcccagcacatggagccccttgggctgagcaccaagaccttgaaccttttttgttttaccttttttccaaataacagttgggagaaatatcaatgaaattctgggggtgggggtggggttgaaagggtggggtgggagatatggaggagtatgaattagggcttggagttggtaaaaacattcctgactatccttcttaaccacgtggctgatgtggggtaggtatgaggggaaggaagtggagtagcctaatgaaaaggggttctagttgagctctgtagataaatgccttgtttcagtgtggttggagacctggtgtcagataaaagaaactccatccgcacagacagatgcaaacagctcctctagttctgcagagctagttgagaactcaacattaatcattttaaaaagtactgtccttgaaatagatttgctgtgggaagaagggcagtgagtgtgggagaaaggagccgtgagcgtggggaaccccacagagcccaaaggactttttcagtattcgaaataaacaaaacaaaaacccatgaaaaaacccaacccagaaataaaaaaaaaaaaaa

SEQ ID NO: 380 - DNA, 2883 bp, Homo Sapiens
tcgcaacgtcacgggcaagggccgccattttgactgagcaaccctagtgacaggagccgaagcagcagcgcaggttgtccccgtttcccctcccccttcccttctccggttgccttcccgggccccttacactccacagtcccggtcccgccatgtcccagaaacaagaagaagagaaccctgcggaggagaccggcgaggagaagcaggacacgcaggagaaagaaggtattctgcctgagagagctgaagaggcaaagctaaaggccaaatacccaagcctaggacaaaagcctggaggctccgacttcctcatgaagagactccagaaagggcaaaagtactttgactcaggagactacaacatggccaaagccaagatgaagaataagcagctgccaagtgcaggaccagacaagaacctggtgactggtgatcacatccccaccccacaggatctgccccagagaaagtcctcgctcgtcaccagcaagcttgcggggtaacctgagcccccctctcctccccttcctcaaccactggacgtttatatattataggcagggatgaaatgggcacctagtcagatcttctcagcttgctagccagaaatgactgtgattctgctgggggctgctgagaaggtaatgtaggttgaaaaggggctctaagtttatttatttcgttagattgacacttccacacactccctgtagtccaggtagggcccagaaataggaaaggctaggattggataatgctgcaaatgctttttttgtgtgagaaactggagagatgtgatttctccttttgggagagaatgtcccaaaattgattaggctgagccttgggaatagtttggcaggtttaacatcccaaggctaacctaacgtagttgggaaaggtagattgaatgagacatgttttctgtgcttctaagtgttctgtcccttaggctgctattgcttcatgtttccattatggcaggtttagagaatccttaaaaagaaaaattgacttgcttgcctaaaactacagtgcccccttagcctccattacttagtatctcttacagtttgctctggctctcaaataatataaagattgatgaacattattcacagaaaatgggcaccttctctctctcttccagcatgttgcttttgaaagtatcatgggatagtgggacgagcactggtttaggagtcaagatatctgggttctcactctactcagtcccagcagagctgttgtataaccttgattaagtcatttagcctctctggatttctatttcctcatctgtaaaatagagttaaatgtatgtaagattgattctgattctgaagtcttaactgccagcagaaaaactccatactgttcattgtaaaactaaaagtgaggaaggctcgtgggtggtgaacctctgctctgtaatactgggaaagtactacagaggggaaccatttgagggatacatgaggagagagtaaattgaggtttggggattataaattcaggcaagagaaccttatagatatcacagtcttgagggtcaaaaaaaaatacttaggaagctagccatggaagcttcttgcctctgacccagcccactttcccagcctacctctgggccttagctgctaaaaagcttctctggcagcggagctgcaggcctgaggaaacatgctcagtcatgcacatgtgttgacccatgtttcagatgcagtctgatgccaggtatattgttagggaaagaggaagaagggtaaactgagctagcccctggggctgagtactcctgcagggctggaggaacaggttcttagaagatgattcaccttggaggaagctggggaaagtggttagggagggagaggaggaagactgagaaatctctgcatccccagaactcagcaacccagctcttttatcatgaggagaggtagccatgctgactcatgaacaggtggaggaaaggggttgcaggtgaccagcatcttcaatctagttaccaccagcttggctagaattttattgaacgcaacttgctagttatgacagagaggaccagggtgagaactaatgctcaagagagcaagattctgtaatcctcttgccctctcacatcacaaattctgatatgccaaacatttggcccaatgagaatgactgatagacttgctgatgtgcatgtggggggatgaggtgtgtatatgcctttctcctgactggccattcagtgttcaggctgtcattcaaattggataggagaaagttggtgaggaaggaatggagagagcaggatccctggactccctggtccccaaactccttgactgtcacttgtaattgtatataatttttgtgtttcttgctccatttcctcatgctgtcatccttaaagtccatctgggaaggggaaaatgctgaacaccattgtatagtttcttcaactgtcccagccatgttgtacatagatatgtcatgttattatatatataaatatatatataattttgtacgttttcttcatctccgatcttctcaaattctgtactttttttcttttctgtctgagctgccttctctatcattcagcttgagtcctcaagactactggtcacaatgagtctgatttttaggaaggaataggaggagcagggaaatcagaaaaactgttggtctcactctgtctctctacctggtcatcttcaaggctaagaaaacaaacaagctacattctgtatttgccagtttccacagcatgaagtacatagcttccttagcaaggagtggtcattccaaaatccaaatgcaaattgctttgattaaacctagattattaaatccattcagaacagcaaaaaaaaaaaaaaaaaa

SEQ ID NO: 381 - DNA, 414 bp, Homo Sapiens
atgtcccagaaacaagaagaagagaaccctgcggaggagaccggcgaggagaagcaggacacgcaggagaaagaaggtattctgcctgagagagctgaagaggcaaagctaaaggccaaatacccaagcctaggacaaaagcctggaggctccgacttcctcatgaagagactccagaaaggggattataaatcattacattggagtgtgcttctctgtgcggatgaaatgcaaaagtactttgactcaggagactacaacatggccaaagccaagatgaagaataagcagctgccaagtgcaggaccagacaagaacctggtgactggtgatcacatccccaccccacaggatctgccccagagaaagtcctcgctcgtcaccagcaagcttgcgggtggccaagttgaatga

SEQ ID NO: 382 - DNA, 2363 bp, Homo Sapiens
gctgccccggaagtggacggcacgccgcggcggggtgggtgcaagatgccgctgccggttcaggtgtttaacttgcaggtaacgagccgaggccgccccgggcctccgcgcccccgcgccccccgccactggggccgggctgaggtcgagcaggggcgcggggcctgcgccaggagtcggtcgggcacgctccgtgccgggcctccgcgggcagcgcgcgtcgggggctgcagggccgagggcgcgtctccgccgtggctgcgcgctgcgatcgggggccgccgggccgcgcccgccccgcctcccctcccagcagctcacgggagaggttcccggccgccccgacgctaacgctctttctcccttcagcagccagccagctctgtgtcagggtcggggggtgcagaaagtcaggacagaatgagggatagctcggcccccagctcggcctcctcgtcagtgacagatctgtactgcacccctcacagcagtaggtcagacctcgtcctgcccggcacggccggggacttcagcctgagcgccagcctgtcggcctgtacgctgctctacgagggggccgtggagcccatgcagatcgacgtggacccccaggaagacccgcagaatgcacctgacgtcaactacgtggtggagaaccccagcctggatctggaacagtacgcggccagctacagcggcctgatgcgcatcgaacggctgcagttcattgctgatcactgccccacgctgcgggtggaggccctgaagatggccctctccttcgtgcagagaacctttaacgtggacatgtacgaggagatccaccgcaagctctcagaggccaccagggagctgcagaacgcacccgacgccatccctgagagcggcgtggagcccccagccctggacacggcctgggtggaggccacgcggaagaaggcgctgctgaagctggagaagctggacacagacctgaagaactacaagggcaactccatcaaagagagcatccggcgcggccacgacgacctgggcgaccactacctggactgtggggacctcagcaacgccctcaagtgctattcccgggcccgggactactgcaccagcgccaaacacgtcatcaacatgtgcctcaatgtcatcaaggtcagcgtctacttgcagaattggtctcatgtgctcagctacgtcagcaaggctgagtccaccccagagattgccgagcagcgaggagagcgtgacagccagacccaggccatcctcaccaagctcaagtgtgccgcaggcttggcagagctggccgccaggaagtacaagcaggctgccaagtgcctcctgctggcttcctttgatcactgtgacttccctgagctgctgtcccccagcaacgtggccatctacggtggcctgtgcgccttggctacctttgaccggcaggagctgcagcgcaatgtcatctccagcagctccttcaagttgttcttggagctggagccacaggtccgagacatcatcttcaaattctacgagtccaagtacgcctcatgtctcaagatgctggacgagatgaaggacaacctgctcctggacatgtatctggccccccatgtcaggaccctgtacacccagattcgcaaccgtgccctcatccagtatttcagcccctacgtgtcagccgacatgcataggatggcggcagccttcaataccacggtggccgccctggaggacgagctgacgcagctaatcctggaggggctgatcagtgcccgtgtggactcacacagcaagatcctatacgcccgggacgtggatcagcgcagcaccacctttgagaagtctctgttgatgggcaaggagttccagcgccgcgccaaggccatgatgctgcgggcagctgtgctccgcaaccagatccatgtcaagtccccgcccagagaagggagccagggggagctgactccagccaacagccagtcccggatgagcaccaacatgtgaggggtgaaccttggcctccaggacatctgcaccccctccccacctccacggacctcggacctccaggcggctcagtgctgcctgcggcccagctaaggggcctggccactgggtgccacccagcctgtgtgccctccctggggctgaggaggcaggcggctgctagttgtggcccttcctggaaggagaggcctgcagggctcgaccctgtgggtttctgtccccagggagcagactgtgcggcacccaggcccagtggcaccatttcccagacccctcctgttcccgcctcagtcaggtgcagacaagtgggcggtgtccattaaagagcagactcagcgttaaaaaaaaaaaaaaaa

SEQ ID NO: 383 - DNA, 5740 bp, Homo Sapiens
cgccgccgccgcacgccgcctgcctcctgcacgccgccgccgcgcctagcgcccgggcccgcgacaccgcccgctaagcgccgggccgagttcacgcagccgcggtctggcggctccgcggcggcggcgggtgcgggcggcctggccggtgccggttaaagggacgagttgcaaacacttcaggaagtgacaagtcgatttcctcctccccgggagtcgctcgtacaaagcgctcggcgccggcaggcgagcgtgcgcgcggcggacgcgcggcgggcaccccggacgacttggcgagcgctggcggtgacggcgcggggtccgcgcccggagcgccccgccgcgcacaggagttgaccacatttggccatttcccagaagggccccaccccaagggtgagtggccaatggggagctgtttctgctgacatcaattccccaggaggtactcaccccaagtctgcccaagtgaagatggctgatacccaccctgggatggagcccagcgcctgaggcccttatcatggtgatggtcctaagtgaaagcctcagcacccggggagctgactccattgcatgtgggaccttcagccgtgaactgcacacgccaaagaagatgagtcaaggacctacacttttctcttgtggaattatggaaaatgacagatggcgagacctggacaggaaatgccctcttcagattgaccaaccgagcaccagcatctgggaatgcctgcctgaaaaggacagctcactatggcaccgggaggcagtgaccgcctgcgctgtgaccagtctgatcaaagacctcagcatcagcgaccacaacgggaacccctcagcaccccctagcaagcgccagtgccgctcactgtccttctccgatgagatgtccagttgccggacatcatggaggcccttgggctccaaagtctggactcccgtggaaaagagacgctgctacagcgggggcagcgtccagcgctattccaacggcttcagcaccatgcagaggagttccagcttcagcctcccttcccgggccaacgtgctctcctcaccctgcgaccaggcaggactccaccaccgatttggagggcagccctgccaaggggtgccaggctcagccccgtgtggacaggcaggtgacacctggagccctgacctgcaccccgtgggaggaggccggctggacctgcagcggtccctctcttgctcacatgagcagttttcctttgtggaatactgtcctccctcagccaacagcacacctgcctcaacaccagagctggcgagacgctccagcggcctttcccgcagccgctcccagccgtgtgtccttaacgacaagaaggtcggtgttaaaaggcggcgccctgaagaagtgcaagagcagaggccttctctagaccttgccaagatggcacagaactgtcagaccttcagcagcctcagctgcctgagcgcagggacagaggactgcggtccccagagccccttcgcccgccacgtcagcaacaccagggcctggaccgccctgctctcagcctccggcccagggggcaggacccccgctgggaccccggtccctgagcctcttcccccttccttcgacgaccacctcgcctgccaggaggacctgtcctgtgaggagtcagacagctgcgccctggacgaggattgtggcaggagagcggagccggctgcagcctggcgggaccgcggggcccctgggaacagcctctgctccctggacggcgagttggacattgagcagatagagaagaactgagggggtgtgggcccaggcagggctggggtgtgctggcatcgacagcccccactctgggcactaggtgggcccttgaaggggagcccaactcgtgggcctgatgaaagcttcctgagtggtgtcgggtcccagagagggagcccacctgctgcctgggggagagcctggcctggccgcgtcatacagcgggtgtgtcagcctctcaccggctccccgagcgtggcagccaccaggtccacagaactactgcagcccagaggacagctttgaagtttgcgtcttttctgcctctttccctgtgggatgttgggcagtctctgttgtccccggcagagctgggcaccgctctgtatccccctggtggtgggggctgtcagggagggcctggggtgggggccaggggccatctgctatgtcagggcccttcttggcctcactcaggttcacttctggggagtcggccccgcagcttctttcactcagttttactccgtgccttctctcccaggtctccctgcttcaggcttgggaaggttcgggagatgcttccttctgtaacaccagaaccatttggccttaattccaatgtgagagacagaatccctggggtgctggactggccctccagagggtaagccatgtccggagtctcgggcccaaggaacgatttggagggtgcttgttagggcctcccgtgttgggtagaaatttggtggatctgttggctgaaaagacggacttgcttgcctctcctacagcatggagaggctgaccccatggctctgccaccgttggggcagggttagcagatggcagcccttctctgtggctgacaggtcactgagtgataagcatggttggttccggtgagtgtagggatggcacgataccagggcagcctcttgaaaacggcctcgggagacgggagctgcgagcaggtgggcagatgagggccctatgcgcactcaggggtgaagggcgtccgctggccactctgcaggggcccctgcaggattccaggcacctcccgtttgtccttgaggactgctggctgtaaccagggcacatcacccacctcaagacaagcccacgcccttgtcagcttagggggagcccagtcctgagggctgcatctctgttgtaggcccagccaccggcacaaagctggattcatgctccctgcccctaccccaccctggctcctcaccctggggcatccgaggagcctagccccctgagggtttgctctcctctcaaggtttgtagctcctctccggctgccttgcagacaccaccacatgggctctgctctatgggaatctggcttttagcgaatgtggcgtcttctgcaaacaatagcaattgggctggcttaggagcaagtggctcattttcccataaggctaaaaataactggtgcgctcccttgtgttggctgacacgcgcgttcaaagcacttttgtagtcactttgcttttgctcgtcttcatggacgagtgaacgcctcgcttctgcaggttgagtccagatgcttctcaccttctttctcctcaagaaagatgctttttgggaaacgttgtttaaatcttatttttttactacatcaaaaggatggtggttcaagttcccaatatgtgggtggcacttcttaaaaatcagctttaaggagctggcagaaagcccccagccccacagccctgagagatggtgttgctagctcaggtggctgacacatggggtatgccgggcactgggcaggtcccagagccggggaaccagctcacctctggttgctgtagctcctgccggaggcatgtctacttgtgatcccggacagccgaacccaagagctggtggctctgagcagacagagacatcttggcctgtccctgcctgggggtcatggagaccatgtcttcttagagcaaatgtggaggcggccagggcagttgttgggtgaatgtggagagcacatggccatgtcttgcccccggagtaccactgggcgtggggggtcctggcaccacatgcccggtgtggccgagggcacacagcctctatagcaggccttcctgtggaaggcagaggcagtgagggaggtggacggtgccagctgaggctgaggcatgcagcagcccccagctacctttgcttagggctggggtgggaggcacatggtgacaggtatatgtcgtgggactggggtgtgggtgacctgccctcaaaccttgcctgccacctccccattcaggcctggtggcaggaagggacaagctgtggagctggctgagtcacagccacctccccacctccccgcaagctggtcccatcgaccagcaagcccagccccagggcgcttagggagaaatgacccagcctcctcagaccccgcctgcctgtcctgtgcccaccacgcagcagtcaggggagaaaatggtggctatcccttctgcttagagaaagaaatggcctttagctggtttcatgtttgtgttttgactggagggagtagaccctatctataaggtgccaccccatcatccaagctgccacactgcccggagcagcctgttcctgcactccaccctgctggccccaggacttctgatctcagtcctctgggagggaggttcgcctaggaggtgccccccacattggtgtccccatgggcagcaggcagacagctcacccccaccagcatgatggccccagctgggggcagtggcaggagccttacttttgtcacagccttgcccacaaaccctgcctctgaggggagactgaggaagggcagagccagaagcaagccgtgccaggccatctgcctgctcatggggtcctaaagcgcgggctaagcctgcaggaaagccggggcggtggggggggcttagtgccacatgcaccccactcattccaaagccaccaaactgccaggggctgccgtccacccgtggggcccaggggctggggccacagccttgccattttcgttgccataccctcttgccttactcgcggtggaggccggatttgcacgggcagacgtgcacctgggcccgtggggagcttgttctgaccagacgtacagattttcattctcagaaagccttacttttcaaccaaatttttgtagccagttttgtgaatttgtacactgaaagaaaatttaaataaaggggaagtccacattaaaaagaaaacaaaacaaaccctaactaacttccaaatgggtctcctggtgcgggggcgtgagtggccgtgccctgggtgtgctgcctgtctgagcaagcttccctagctgtggaaccccgggccccctgctgcgggctctgccttggtgtcatgcctgctgcacccccgtttccactgacgtgccgtctgtggctatgggggtggtcactggaatgacggtcactccagacgtcagccggcagggatgcagcaggctggccgcgcaccggggctcgggcaccctctggccccacactggcaatgatgccacaccttgccatgtccacgctgttggtcaaacccctctgtcatgcctctttaaagagaaaagaagagaaagattttttttttttttaatggcagaccgaagtggagatcttgtagcctagataggatagtctgaccttctagcatagtctttttggcaaatgatttgtgttttcagtgtgtggggaagctgtcctgggggctggggcgacagatagcacataggctgtttctggggctgcaggggcttccctgagctggatgttgtgggtgttgccgtgcttcaggaagtgtggcgaccagaaagcgtagacccggggcccagggtctgcccgcccctgcagcctggcctccccgcacaggctgtggcttgcactccagccgctctagtctctcaggaatttgcttgttacttgtactgtgtaaataaagcttcctggttcaataccc

SEQ ID NO: 384 - DNA, 1027 bp, Homo Sapiens
gactcccaagatggcggacctactgggctccatcctgagctccatggagaagccacccagcctcggtgaccaggagactcggcgcaaggcccgagaacaggccgcccgcctgaagaaactacaagagcaagagaaacaacagaaagtggagtttcgtaaaaggatggagaaggaggtgtcagatttcattcaagacagtgggcagatcaagaaaaagtttcagccaatgaacaagatcgagaggagcatactacatgatgtggtggaagtggctggcctgacatccttctcctttggggaagatgatgactgtcgctatgtcatgatcttcaaaaaggagtttgcaccctcagatgaagagctagactcttaccgtcgtggagaggaatgggacccccagaaggctgaggagaagcggaagctgaaggagctggcccagaggcaagaggaggaggcagcccagcaggggcctgtggtggtgagccctgccagcgactacaaggacaagtacagccacctcatcggcaagggagcagccaaagacgcagcccacatgctacaggccaataagacctacggctgtgtgcccgtggccaataagagggacacacgctccattgaagaggctatgaatgagatcagagccaagaagcgtctgcggcagagtggggaagagttgccgccaacctctaggcgccccgcccagctccctttgacccctggggcagggcagggggcagggagagacaaggctgctgctattagagcccatcctggagccccacctctgaaccacctcctaccagctgtccctcaggctgggggaaaacaggtgtttgatttgtcaccgttggagcttggatatgtgcgtggcatgtgtgtgtgtgtgtgagagtgtgaatgcacaggtgggtatttaatctgtattattccccgttcttggaattttcttccccatggggctggggtactttacattcaataaatactgtttaacccaaaaaaaaaaaaaaaaaaaaaaaaaaaa

SEQ ID NO: 385 - DNA, 3045 bp, Homo Sapiens
gattcgcgtcccggaagcggcggtggcggccgcggcgtaggcggaggagattttcggacctgcgacttccgaacaaccctggcaggaggagcggcgttcagccgggggaggcctgaagaaacgctccggggcccagtggctctacccctgctcctgcccgaccctgccgcctccctcacggagccagcggccgggatgcagacatcagaacgtgaggggagtgggccggagctgagccccagcgtgatgcccgaggctcccctggagtctccaccttttcctaccaagtccccagcgtttgaccttttcaacttggttctctcctacaagaggctggagatctacctggaacccttgaaggatgcaggtgatggtgttcgatacttgctcaggtggcagatgcctttgtgttccttgctgacctgcctgggcctcaacgtcttgttcctcactttgaatgagggtgcatggtactcagtaggtgccctgatgatttcagtgcccgccctgctgggctaccttcaggaggtttgccgggcacggctgcctgattccgagctgatgcggaggaagtatcatagcgtgaggcaggaggacctgcagagaggtcgcctgtctcgtcccgaggccgtggctgaggtgaagagcttcttgatccagctggaggccttcctgagccgcctgtgctgcacatgtgaagccgcctaccgcgtgctgcactgggagaaccccgtcgtgtcctcacagttctatggggctcttctgggcacagtctgcatgctgtatttgctgccactctgctgggttctcacccttttaaacagcacgctctttctggggaatgtggagttcttccgagttgtgtctgagtacagggcatctctgcagcagaggatgaacccaaagcaggaagagcatgcctttgagagtcctccaccaccagatgttggggggaaggatggtctgatggacagcacgcctgccctcacacccacggagagtctctcttcccaggacctcacaccgggcagcgtggaggaggctgaggaggctgagccagatgaagagtttaaagatgcgattgaggagacccacttggtggtgctggaggatgatgagggcgccccgtgcccagcagaggatgagctggccctgcaggacaacgggttcctgagcaagaatgaggtgctgcgcagcaaggtgtctcggctcacggagcggctccgcaagcgctaccccaccaacaacttcgggaactgcacgggctgctcggccaccttctcagtgctgaagaagaggcggagctgcagtaattgtggaaacagcttctgctctcgatgctgctccttcaaggtgcccaagtcctccatgggggccacagcccctgaagcccagagggagactgtgtttgtgtgtgcctcgtgtaaccagaccttgagcaagtgagaagagaggccagggtccaaccaggcacccgtccttgggaccagcagtagaccccccactctccccacccctggcccactgtggtgtgtgctgggcaaatgtggcctgaatgctaggtaggcttccccttccttcctcactctctccagctggattctggagctgttctccatccatgagagtggctggcaatggctgctctcaatcccttgagggagaagagcccctggagggcctggcatgtttgtcctgctctgcctgggactgagcgagtggacttagggctgggcaggcagtagccaccagagggcagcagcgaactaggccaggcctgactggggtctgaagatcagggtcagtgtggctgtgcctgggaattccagacctgaggttgggaaaagaggtttttctcctgcagggtactgggccaggccctcagcctcagagagcctgcagaagggcttgggagtgccacaccccatctctgctgattgaatgtccctccaggcaccaggatctcatcatttccccatcagagggtgtggccaggcctaacaagaccatgggtgcttctagaaacagggttgaagttcccagattccctgagaggagaatgtgtataggagggtttggctgagtccttcagcgttaagtggaggaaagcttggggaagccccaatagctggacagacctcagcctcccctcgaagacacctcaattcacagactctcagcccacacaatgccccagtgtccccagctccgctggagcagctgcagggcacttggatcacaacttctgcaccctctgtccagagtctagggcagtcctccactggcccagcactccagtttcctttccctgcctcttgtccaatggagtgggaggccaggtgagtggagcagaggtcctgaagcccttgacccctgggggcctgggtagtgtaggatctcgctgggctgggtcctggattccagggctattccctggaggacagtctcagttatgggataaggccccctgggggtctccatttctttccaacagtttcatgttcactactggactcttacgggctcagtatctctcccttagccatgagctggctcaggcatcccttcccttccctggagctgccctgcctttctcaagtatttatttatttattgcatggttcctgggaacatgtggcacaagtaatgggatgaggaggaattgggggtgggggtcttctacctaggactcttccctggagtcatgggctgcctgggacccaggacccatgagggggctgagaggtttctacactcgaggagcaggggtccagagaggcaggctggggaggcaagggacccatcctaggcccgctttcttgccgagccaagcagcttagctggggctgtgcagccaggggcttacccaggccagtggaggtgccacagccctggggagccagacaggctttggtatcgtatcgcctctgtgtccttttaagagaggagagttcagtaccccgtgctttctttacactggagaggaactaaaaggatctctgtgtctatggagaattgtcaataaaaaggcctcaagcttcaaaa

SEQ ID NO: 386 - DNA, 1203 bp, Homo Sapiens
gtcgtcacgcgtcccgcgcctcctcgcgcctgcaccgtggttggaaggtcgtcccctgtgaccggttgggcggttggagcggctgtcgccatgttgtcggtagcagcccgctcgggcccgttcgcgcccgtcctgtcggccacgtcccgcggggtggcgggcgcgctgcggcccttggtgcaggccacggtgcccgccaccccggagcagcctgtgttggacctgaagcggcccttcctcagccgggagtcgctgagcggccaggccgtgcgccggcctttggtcgcctccgtgggcctcaatgtccctgcttctgtttgttattcccacacagacatcaaggtgcctgacttctctgaataccgccgccttgaagttttagatagtacgaagtcttcaagagaaagcagcgaggctaggaaaggtttctcctatttggtaactggagtaactactgtgggtgtcgcatatgctgccaagaatgccgtcacccagttcgtttccagcatgagtgcttctgctgatgtgttggccctggcgaaaatcgaaatcaagttatccgatattccagaaggcaagaacatggctttcaaatggagaggcaaacccctgtttgtgcgtcatagaacccagaaggaaattgagcaggaagctgcagttgaattatcacagttgagggacccacagcatgatctagatcgagtaaagaaacctgaatgggttatcctgataggtgtttgcactcatcttggctgtgtacccattgcaaatgcaggagattttggtggttattactgcccttgccatgggtcacactatgatgcatctggcaggatcagattgggtcctgctcctctcaaccttgaagtccccacgtatgagttcaccagtgacgatatggtgattgttggttaagagacttggactcaagtcataggcttctttcagtctttatgtcacctcaggagacttatttgagaggaagccttctgtacttgaagttgatttgaaatatgtaagaattgatgatgtatttgcaaacattaatgtgaaataaattgaatttaatgttgaatactttcaggcattcacttaataaagacactgttaagcactgttatgctcagtcatacacgcgaaaggtacaatgtcttttagctaattctaattaaaaattacagactggtgtacaagatacttgtg

SEQ ID NO: 387 - DNA, 10719 bp, Homo Sapiens
tggagacagaatggaggtgctgccggactcggaaatggggtccaagggtagccaaggatggctgcagcttcatatgatcagttgttaaagcaagttgaggcactgaagatggagaactcaaatcttcgacaagagctagaagataattccaatcatcttacaaaactggaaactgaggcatctaatatgaaggaagtacttaaacaactacaaggaagtattgaagatgaagctatggcttcttctggacagattgatttattagagcgtcttaaagagcttaacttagatagcagtaatttccctggagtaaaactgcggtcaaaaatgtccctccgttcttatggaagccgggaaggatctgtatcaagccgttctggagagtgcagtcctgttcctatgggttcatttccaagaagagggtttgtaaatggaagcagagaaagtactggatatttagaagaacttgagaaagagaggtcattgcttcttgctgatcttgacaaagaagaaaaggaaaaagactggtattacgctcaacttcagaatctcactaaaagaatagatagtcttcctttaactgaaaatttttccttacaaacagatatgaccagaaggcaattggaatatgaagcaaggcaaatcagagttgcgatggaagaacaactaggtacctgccaggatatggaaaaacgagcacagcgaagaatagccagaattcagcaaatcgaaaaggacatacttcgtatacgacagcttttacagtcccaagcaacagaagcagagaggtcatctcagaacaagcatgaaaccggctcacatgatgctgagcggcagaatgaaggtcaaggagtgggagaaatcaacatggcaacttctggtaatggtcagggttcaactacacgaatggaccatgaaacagccagtgttttgagttctagtagcacacactctgcacctcgaaggctgacaagtcatctgggaaccaaggtggaaatggtgtattcattgttgtcaatgcttggtactcatgataaggatgatatgtcgcgaactttgctagctatgtctagctcccaagacagctgtatatccatgcgacagtctggatgtcttcctctcctcatccagcttttacatggcaatgacaaagactctgtattgttgggaaattcccggggcagtaaagaggctcgggccagggccagtgcagcactccacaacatcattcactcacagcctgatgacaagagaggcaggcgtgaaatccgagtccttcatcttttggaacagatacgcgcttactgtgaaacctgttgggagtggcaggaagctcatgaaccaggcatggaccaggacaaaaatccaatgccagctcctgttgaacatcagatctgtcctgctgtgtgtgttctaatgaaactttcatttgatgaagagcatagacatgcaatgaatgaactagggggactacaggccattgcagaattattgcaagtggactgtgaaatgtatgggcttactaatgaccactacagtattacactaagacgatatgctggaatggctttgacaaacttgacttttggagatgtagccaacaaggctacgctatgctctatgaaaggctgcatgagagcacttgtggcccaactaaaatctgaaagtgaagacttacagcaggttattgcgagtgttttgaggaatttgtcttggcgagcagatgtaaatagtaaaaagacgttgcgagaagttggaagtgtgaaagcattgatggaatgtgctttagaagttaaaaaggaatcaaccctcaaaagcgtattgagtgccttatggaatttgtcagcacattgcactgagaataaagctgatatatgtgctgtagatggtgcacttgcatttttggttggcactcttacttaccggagccagacaaacactttagccattattgaaagtggaggtgggatattacggaatgtgtccagcttgatagctacaaatgaggaccacaggcaaatcctaagagagaacaactgtctacaaactttattacaacacttaaaatctcatagtttgacaatagtcagtaatgcatgtggaactttgtggaatctctcagcaagaaatcctaaagaccaggaagcattatgggacatgggggcagttagcatgctcaagaacctcattcattcaaagcacaaaatgattgctatgggaagtgctgcagctttaaggaatctcatggcaaataggcctgcgaagtacaaggatgccaatattatgtctcctggctcaagcttgccatctcttcatgttaggaaacaaaaagccctagaagcagaattagatgctcagcacttatcagaaacttttgacaatatagacaatttaagtcccaaggcatctcatcgtagtaagcagagacacaagcaaagtctctatggtgattatgtttttgacaccaatcgacatgatgataataggtcagacaattttaatactggcaacatgactgtcctttcaccatatttgaatactacagtgttacccagctcctcttcatcaagaggaagcttagatagttctcgttctgaaaaagatagaagtttggagagagaacgcggaattggtctaggcaactaccatccagcaacagaaaatccaggaacttcttcaaagcgaggtttgcagatctccaccactgcagcccagattgccaaagtcatggaagaagtgtcagccattcatacctctcaggaagacagaagttctgggtctaccactgaattacattgtgtgacagatgagagaaatgcacttagaagaagctctgctgcccatacacattcaaacacttacaatttcactaagtcggaaaattcaaataggacatgttctatgccttatgccaaattagaatacaagagatcttcaaatgatagtttaaatagtgtcagtagtagtgatggttatggtaaaagaggtcaaatgaaaccctcgattgaatcctattctgaagatgatgaaagtaagttttgcagttatggtcaatacccagccgacctagcccataaaatacatagtgcaaatcatatggatgataatgatggagaactagatacaccaataaattatagtcttaaatattcagatgagcagttgaactctggaaggcaaagtccttcacagaatgaaagatgggcaagacccaaacacataatagaagatgaaataaaacaaagtgagcaaagacaatcaaggaatcaaagtacaacttatcctgtttatactgagagcactgatgataaacacctcaagttccaaccacattttggacagcaggaatgtgtttctccatacaggtcacggggagccaatggttcagaaacaaatcgagtgggttctaatcatggaattaatcaaaatgtaagccagtctttgtgtcaagaagatgactatgaagatgataagcctaccaattatagtgaacgttactctgaagaagaacagcatgaagaagaagagagaccaacaaattatagcataaaatataatgaagagaaacgtcatgtggatcagcctattgattatagtttaaaatatgccacagatattccttcatcacagaaacagtcattttcattctcaaagagttcatctggacaaagcagtaaaaccgaacatatgtcttcaagcagtgagaatacgtccacaccttcatctaatgccaagaggcagaatcagctccatccaagttctgcacagagtagaagtggtcagcctcaaaaggctgccacttgcaaagtttcttctattaaccaagaaacaatacagacttattgtgtagaagatactccaatatgtttttcaagatgtagttcattatcatctttgtcatcagctgaagatgaaataggatgtaatcagacgacacaggaagcagattctgctaataccctgcaaatagcagaaataaaagaaaagattggaactaggtcagctgaagatcctgtgagcgaagttccagcagtgtcacagcaccctagaaccaaatccagcagactgcagggttctagtttatcttcagaatcagccaggcacaaagctgttgaattttcttcaggagcgaaatctccctccaaaagtggtgctcagacacccaaaagtccacctgaacactatgttcaggagaccccactcatgtttagcagatgtacttctgtcagttcacttgatagttttgagagtcgttcgattgccagctccgttcagagtgaaccatgcagtggaatggtaagtggcattataagccccagtgatcttccagatagccctggacaaaccatgccaccaagcagaagtaaaacacctccaccacctcctcaaacagctcaaaccaagcgagaagtacctaaaaataaagcacctactgctgaaaagagagagagtggacctaagcaagctgcagtaaatgctgcagttcagagggtccaggttcttccagatgctgatactttattacattttgccacggaaagtactccagatggattttcttgttcatccagcctgagtgctctgagcctcgatgagccatttatacagaaagatgtggaattaagaataatgcctccagttcaggaaaatgacaatgggaatgaaacagaatcagagcagcctaaagaatcaaatgaaaaccaagagaaagaggcagaaaaaactattgattctgaaaaggacctattagatgattcagatgatgatgatattgaaatactagaagaatgtattatttctgccatgccaacaaagtcatcacgtaaagcaaaaaagccagcccagactgcttcaaaattacctccacctgtggcaaggaaaccaagtcagctgcctgtgtacaaacttctaccatcacaaaacaggttgcaaccccaaaagcatgttagttttacaccgggggatgatatgccacgggtgtattgtgttgaagggacacctataaacttttccacagctacatctctaagtgatctaacaatcgaatcccctccaaatgagttagctgctggagaaggagttagaggaggggcacagtcaggtgaatttgaaaaacgagataccattcctacagaaggcagaagtacagatgaggctcaaggaggaaaaacctcatctgtaaccatacctgaattggatgacaataaagcagaggaaggtgatattcttgcagaatgcattaattctgctatgcccaaagggaaaagtcacaagcctttccgtgtgaaaaagataatggaccaggtccagcaagcatctgcgtcttcttctgcacccaacaaaaatcagttagatggtaagaaaaagaaaccaacttcaccagtaaaacctataccacaaaatactgaatataggacacgtgtaagaaaaaatgcagactcaaaaaataatttaaatgctgagagagttttctcagacaacaaagattcaaagaaacagaatttgaaaaataattccaaggtcttcaatgataagctcccaaataatgaagatagagtcagaggaagttttgcttttgattcacctcatcattacacgcctattgaaggaactccttactgtttttcacgaaatgattctttgagttctctagattttgatgatgatgatgttgacctttccagggaaaaggctgaattaagaaaggcaaaagaaaataaggaatcagaggctaaagttaccagccacacagaactaacctccaaccaacaatcagctaataagacacaagctattgcaaagcagccaataaatcgaggtcagcctaaacccatacttcagaaacaatccacttttccccagtcatccaaagacataccagacagaggggcagcaactgatgaaaagttacagaattttgctattgaaaatactccggtttgcttttctcataattcctctctgagttctctcagtgacattgaccaagaaaacaacaataaagaaaatgaacctatcaaagagactgagccccctgactcacagggagaaccaagtaaacctcaagcatcaggctatgctcctaaatcatttcatgttgaagataccccagtttgtttctcaagaaacagttctctcagttctcttagtattgactctgaagatgacctgttgcaggaatgtataagctccgcaatgccaaaaaagaaaaagccttcaagactcaagggtgataatgaaaaacatagtcccagaaatatgggtggcatattaggtgaagatctgacacttgatttgaaagatatacagagaccagattcagaacatggtctatcccctgattcagaaaattttgattggaaagctattcaggaaggtgcaaattccatagtaagtagtttacatcaagctgctgctgctgcatgtttatctagacaagcttcgtctgattcagattccatcctttccctgaaatcaggaatctctctgggatcaccatttcatcttacacctgatcaagaagaaaaaccctttacaagtaataaaggcccacgaattctaaaaccaggggagaaaagtacattggaaactaaaaagatagaatctgaaagtaaaggaatcaaaggaggaaaaaaagtttataaaagtttgattactggaaaagttcgatctaattcagaaatttcaggccaaatgaaacagccccttcaagcaaacatgccttcaatctctcgaggcaggacaatgattcatattccaggagttcgaaatagctcctcaagtacaagtcctgtttctaaaaaaggcccaccccttaagactccagcctccaaaagccctagtgaaggtcaaacagccaccacttctcctagaggagccaagccatctgtgaaatcagaattaagccctgttgccaggcagacatcccaaataggtgggtcaagtaaagcaccttctagatcaggatctagagattcgaccccttcaagacctgcccagcaaccattaagtagacctatacagtctcctggccgaaactcaatttcccctggtagaaatggaataagtcctcctaacaaattatctcaacttccaaggacatcatcccctagtactgcttcaactaagtcctcaggttctggaaaaatgtcatatacatctccaggtagacagatgagccaacagaaccttaccaaacaaacaggtttatccaagaatgccagtagtattccaagaagtgagtctgcctccaaaggactaaatcagatgaataatggtaatggagccaataaaaaggtagaactttctagaatgtcttcaactaaatcaagtggaagtgaatctgatagatcagaaagacctgtattagtacgccagtcaactttcatcaaagaagctccaagcccaaccttaagaagaaaattggaggaatctgcttcatttgaatctctttctccatcatctagaccagcttctcccactaggtcccaggcacaaactccagttttaagtccttcccttcctgatatgtctctatccacacattcgtctgttcaggctggtggatggcgaaaactcccacctaatctcagtcccactatagagtataatgatggaagaccagcaaagcgccatgatattgcacggtctcattctgaaagtccttctagacttccaatcaataggtcaggaacctggaaacgtgagcacagcaaacattcatcatcccttcctcgagtaagcacttggagaagaactggaagttcatcttcaattctttctgcttcatcagaatccagtgaaaaagcaaaaagtgaggatgaaaaacatgtgaactctatttcaggaaccaaacaaagtaaagaaaaccaagtatccgcaaaaggaacatggagaaaaataaaagaaaatgaattttctcccacaaatagtacttctcagaccgtttcctcaggtgctacaaatggtgctgaatcaaagactctaatttatcaaatggcacctgctgtttctaaaacagaggatgtttgggtgagaattgaggactgtcccattaacaatcctagatctggaagatctcccacaggtaatactcccccggtgattgacagtgtttcagaaaaggcaaatccaaacattaaagattcaaaagataatcaggcaaaacaaaatgtgggtaatggcagtgttcccatgcgtaccgtgggtttggaaaatcgcctgaactcctttattcaggtggatgcccctgaccaaaaaggaactgagataaaaccaggacaaaataatcctgtccctgtatcagagactaatgaaagttctatagtggaacgtaccccattcagttctagcagctcaagcaaacacagttcacctagtgggactgttgctgccagagtgactccttttaattacaacccaagccctaggaaaagcagcgcagatagcacttcagctcggccatctcagatcccaactccagtgaataacaacacaaagaagcgagattccaaaactgacagcacagaatccagtggaacccaaagtcctaagcgccattctgggtcttaccttgtgacatctgtttaaaagagaggaagaatgaaactaagaaaattctatgttaattacaactgctatatagacattttgtttcaaatgaaactttaaaagactgaaaaattttgtaaataggtttgattcttgttagagggtttttgttctggaagccatatttgatagtatactttgtcttcactggtcttattttgggaggcactcttgatggttaggaaaaaaatagtaaagccaagtatgtttgtacagtatgttttacatgtatttaaagtagcatcccatcccaacttcctttaattattgcttgtcttaaaataatgaacactacagatagaaaatatgatatattgctgttatcaatcatttctagattataaactgactaaacttacatcagggaaaaattggtatttatgcaaaaaaaaatgtttttgtccttgtgagtccatctaacatcataattaatcatgtggctgtgaaattcacagtaatatggttcccgatgaacaagtttacccagcctgctttgctttactgcatgaatgaaactgatggttcaatttcagaagtaatgattaacagttatgtggtcacatgatgtgcatagagatagctacagtgtaataatttacactattttgtgctccaaacaaaacaaaaatctgtgtaactgtaaaacattgaatgaaactattttacctgaactagattttatctgaaagtaggtagaatttttgctatgctgtaatttgttgtatattctggtatttgaggtgagatggctgctcttttattaatgagacatgaattgtgtctcaacagaaactaaatgaacatttcagaataaattattgctgtatgtaaactgttactgaaattggtatttgtttgaagggtcttgtttcacatttgtattaataattgtttaaaatgcctcttttaaaagcttatataaatttttttcttcagcttctatgcattaagagtaaaattcctcttactgtaataaaaacaattgaagaagactgttgccacttaaccattccatgcgttggcacttatctattcctgaaatttcttttatgtgattagctcatcttgatttttaatatttttccacttaaacttttttttcttactccactggagctcagtaaaagtaaattcatgtaatagcaatgcaagcagcctagcacagactaagcattgagcataataggcccacataatttcctctttcttaatattatagaattctgtacttgaaattgattcttagacattgcagtctcttcgaggctttacagtgtaaactgtcttgccccttcatcttcttgttgcaactgggtctgacatgaacactttttatcaccctgtatgttagggcaagatctcagcagtgaagtataatcagcactttgccatgctcagaaaattcaaatcacatggaactttagaggtagatttaatacgattaagatattcagaagtatattttagaatccctgcctgttaaggaaactttatttgtggtaggtacagttctggggtacatgttaagtgtccccttatacagtggagggaagtcttccttcctgaaggaaaataaactgacacttattaactaagataatttacttaatatatcttccctgatttgttttaaaagatcagagggtgactgatgatacatgcatacatatttgttgaataaatgaaaatttatttttagtgataagattcatacactctgtatttggggagggaaaacctttttaagcatggtggggcactcagataggagtgaatacacctacctggtgccttgaaaatcacatcaagtagttaattatctaccccttacctgtgtttataacttccaggtaatgagaatgattttttttaaagctaaaatgccagtaaataaaagtgctatgacttgagctaagatatttgactccaatgcctgtactgtgtctactgcaccactttgtaaacacttcaatttactatctttgaaatgattgacctttaaatttttgccaaatgttatctgaaattgtctatgaataccatctacttctgttgttttcccaggcttccataaacaatggagatacatgcaaaaaaaaaaaaaaaaaa

SEQ ID NO: 388 - DNA, 5179 bp, Homo Sapiens
acctctactggggagacgaggaccccgaggttctggggggcgacgcgacctgcccgaagtgacaagggtcctgggccgcactgctccgccggggtctgcgctcctcggcggagcgggtgggaaggatgagtcctcggggtggagaaggaggagcgggtccccgggtaccgctcacccggccttaggagcccgggagcgcgcgtagggacgcggagttgaggctctccatctgcggccagggaaagggatacagtcccccgggcccctcccggccgctcggaacccaccccaggcgcgtccccgcgggcgcgcgctccaggcggggccgacgggctcggaggcgcgcgcccgctgccgggtccgccgcgcgcgctccctccgctcctctcccccgcccctcccgggcccgcgcgctcccagggtccgccgcgcgcgcgcctcgcgtcgctccccatccccgcccctcccgccgccaccccgcccccggccgggtaccctcgccggacccgagagagagcgccgccgccatcttagttgctgccgctgccttcagcaagacgctgctctgaggcggggagggcgccgcgtcctgagcgcgcggcccagcgtcacggcggcggcggcggcggctcctccttggacccccggagctccccgcgccgcggagcagctggccccaggcccctagagccccgagagctccgagagctccgctcggcgtcccgcgcgcctccctgccgctcccgccccgggctggcgatgctgcgccgccccgctcccgcgctggccccggccgcccggctgctgctggccgggctgctgtgcggcggcggggtctgggccgcgcgagttaacaagcacaagccctggctggagcccacctaccacggcatagtcacagagaacgacaacaccgtgctcctcgaccccccactgatcgcgctggataaagatgcgcctctgcgatttgcaggtgagatttgtggatttaaaattcacgggcagaatgtcccctttgatgcagtggtagtggataaatccactggtgagggagtcattcgctccaaagagaaactggactgtgagctgcagaaagactattcattcaccatccaggcctatgattgtgggaagggacctgatggcaccaacgtgaaaaagtctcataaagcaactgttcatattcaggtgaacgacgtgaatgagtacgcgcccgtgttcaaggagaagtcctacaaagccacggtcatcgaggggaagcagtacgacagcattttgagggtggaggccgtggatgccgactgctcccctcagttcagccagatttgcagctacgaaatcatcactccagacgtgccctttactgttgacaaagatggttatataaaaaacacagagaaattaaactacgggaaagaacatcaatataagctgaccgtcactgcctatgactgtgggaagaaaagagccacagaagatgttttggtgaagatcagcattaagcccacctgcacccctgggtggcaaggatggaacaacaggattgagtatgagccgggcaccggcgcgttggccgtctttccaaatatccacctggagacatgtgacgagccagtcgcctcagtacaggccacagtggagctagaaaccagccacatagggaaaggctgcgaccgagacacctactcagagaagtccctccaccggctctgtggtgcggccgcgggcactgccgagctgctgccatccccgagtggatccctcaactggaccatgggcctgcccaccgacaatggccacgacagcgaccaggtgtttgagttcaacggcacccaggcagtgaggatcccggatggcgtcgtgtcggtcagccccaaagagccgttcaccatctcggtgtggatgagacatgggccattcggcaggaagaaggagacaattctttgcagttctgataaaacagatatgaatcggcaccactactccctctatgtccacgggtgccggctgatcttcctcttccgtcaggatccttctgaggagaagaaatacagacctgcagagttccactggaagttgaatcaggtctgtgatgaggaatggcaccactacgtcctcaatgtagaattcccgagtgtgactctctatgtggatggcacgtcccacgagcccttctctgtgactgaggattacccgctccatccatccaagatagaaactcagctcgtggtgggggcttgctggcaagagttttcaggagttgaaaatgacaatgaaactgagcctgtgactgtggcctctgcaggtggcgacctgcacatgacccagtttttccgaggcaatctggctggcttaactctccgttccgggaaactcgcggataagaaggtgatcgactgtctgtatacctgcaaggaggggctggacctgcaggtcctcgaagacagtggcagaggcgtgcagatccaagcacaccccagccagttggtattgaccttggagggagaagacctcggggaattggataaggccatgcagcacatctcgtacctgaactcccggcagttccccacgcccggaattcgcagactcaaaatcaccagcacaatcaagtgttttaacgaggccacctgcatttcggtccccccggtagatggctacgtgatggttttacagcccgaggagcccaagatcagcctgagtggcgtccaccattttgcccgagcagcttctgaatttgaaagctcagaaggggtgttccttttccctgagcttcgcatcatcagcaccatcacgagagaagtggagcctgaaggggacggggctgaggaccccacagttcaagaatcactggtgtccgaggagatcgtgcacgacctggatacctgtgaggtcacggtggagggagaggagctgaaccacgagcaggagagcctggaggtggacatggcccgcctgcagcagaagggcattgaagtgagcagctctgaactgggcatgaccttcacaggcgtggacaccatggccagctacgaggaggttttgcacctgctgcgctatcggaactggcatgccaggtccttgcttgaccggaagtttaagctcatctgctcagagctgaatggccgctacatcagcaacgaatttaaggtggaggtgaatgtaatccacacggccaaccccatggaacacgccaaccacatggctgcccagccacagttcgtgcacccggaacaccgctcctttgttgacctgtcaggccacaacctggccaacccccacccgttcgcagtcgtccccagcactgcgacagttgtgatcgtggtgtgcgtcagcttcctggtgttcatgattatcctgggggtatttcggatccgggccgcacatcggcggaccatgcgggatcaggacaccgggaaggagaacgagatggactgggacgactctgccctgaccatcaccgtcaaccccatggagacctatgaggaccagcacagcagtgaggaggaggaggaagaggaagaggaagaggaaagcgaggacggcgaagaagaggatgacatcaccagcgccgagtcggagagcagcgaggaggaggagggggagcagggcgacccccagaacgcaacccggcagcagcagctggagtgggatgactccaccctcagctactgacccgtgcccccggccacctcggtttctgctttcgaagactctgctgccatccgttctcccagtcccaagggtccacgatgtacaaagtcatttcggccagtaggtgtgcagacccctccccgccacgatcgtcgctgtgcttggtgtgtaggaccctaggctccccgcccaccctctgcctggtcgcgctcttcagtcccacgaggagctgacacgtcctctctggccgccatccggctcgcacaggggcctcccagcgcctcaggccccgcgtttgtgtctggagtctccccccggggagaggacactggcccctcgcactccagaaaagccatgccagctgggctcgttgacaaagggtaaaacatgctcactcccacccggtaatcatttttttctttttttaaaaaaagtttttattttttccaaactagtgcatgtataaataatggcaggatggggggtactgtgtagatgattaactgactttttaatattttgtaaataaatcggattccttgtgtcctttgtgctagtgtaacccgggactggaatgtaaagtgaagttcggagctctgagcacgggctcttcccgccgggtcctccctccccagaccccagagggagaggcccaccccgcccagccccgccccagcccctgctcaggtctgagtatggctgggagtcgggggccacaggcctctagctgtgctgctcaagagactggatcagggtagctacaagtggccgggccttgcctttgggattctacctgttcctaatttggtgtggggtgcggggtccctggccccttttccacactcctcctccgacagcagctccctgggcagtggcctggtctcaccgtgtgcagccttgtggtttatgcttaaatgtacattttcctgctggtaaaaggagaaactgagaggtgtcctgcagaccggctgaccactccttttggagacggcaggaggcctgagcgatccgtactcagaacgtccaggagagacgcatggcccgaagtcaaagtgctggaattttccaaaacagcctgttctctcctctctcctccccagagcaccccctgccatcaggggggttgaaatccctctcccccaggagccctgctgctttgcttggtggtagggcaggagagcaaacaaacagtcatggtctaaaacccacatagcactttgctcttagttacatgtaaaattttagatttctaaaacaggtgggcaatcattttgaatactgttctgtgaccctgactgctagttctgaggacactggtggctgtgctatgtgtggccatcctccatgtcccgtccctgtagctgctctgtttagacagcggacagacgctcacgcccaggggatgtcctcacgctgtcgccgcgcggtttcccttcgcagatgtgtatactcatgataggtcagaaagtgtatccgctacaataaagttctggttctaactaactccaaaaaaaaaaaaaaaaaa

SEQ ID NO: 389 - DNA, 1137 bp, Homo Sapiens
ggtgccttatgcggtgattttaatgataggtgtcatatataggacggagtaatctgtttacattctgttcttctcgatgcactcacaagcgggtaactaggtgacaagaaaacaaagatcttattcaaaagaggtcttacagcaacccaacgtctcatcttcccatagtaaagatgacggcgccttgaggtaagctacaggcaacaccacttccgcgtttctcttgcgccctggtccaagatggcggatgaagccacgcgacgtgttgtgtctgagatcccggtgctgaagactaacgccggaccccgagatcgtgagttgtgggtgcagcgactgaaggaggaatatcagtcccttatccggtatgtggagaacaacaagaatgctgacaacgattggttccgactggagtccaacaaggaaggaactcggtggtttggaaaatgctggtatatccatgacctcctgaaatatgagtttgacatcgagtttgacattcctatcacatatcctactactgccccagaaattgcagttcctgagctggatggaaagacagcaaagatgtacaggggtggcaaaatatgcctgacggatcatttcaaacctttgtgggccaggaatgtgcccaaatttggactagctcatctcatggctctggggctgggtccatggctggcagtggaaatccctgatctgattcagaagggcgtcatccaccacaaagagaaatgcaaccaatgaagaatcaagccactgaggcagggcagagggacctttgataggctacgatactattttcctgtgcatcacacttaactcatctaactgcttccccggacaccctccacctctagttgttactaagtagctgcagtaggcattgctggggaagaaacaaacacacaccaaacagtactgctacttagtttctaaggctgcacagggaagggaaagactgggctttggacaatctagaggtaatttatatccgcccccaggtggagcaacatgcgattctggaggcacgggggtaactgaaagtgagtacatatagtctttctggtttctggagataacccatcaataaaagctgcttcctctggtaaaaaaaaaaaaaaaaaaaaaaaaaaaaaa

SEQ ID NO: 390 - DNA, 3540 bp, Homo Sapiens
acttcctgccgggctgcgggcgcctgagcggctcttcagcgtttgcgccggcggctgccgcgtctctctcggctcccgcttcctttgaccgcctcccccccccggcccggcggcgcccgcctcctccacggccactccgcctcttccctcccttcgtcccttcttcctctcccttttttccttcttccttcccctcctcgccgccaccgcccaggaccgccggccgggggacgagctcggagcagcagccaggtggagttttgctcttgtcgcccaggctggagtgcagtggcgtgatctcggctcactgcaacctccacctcccaggttcaagcgattttcccacttcagcctcccgataagctgagattacagagtttattaaccacttaacctctcagaactgaacaaagacaacattgttcctggaacgccctctttttaaaaaagaaagcataacccctactgtagaactaaatgcactgtgcatgaaacttggaaaaaaaccaatgtataagcctgttgacccttactctcggatgcagtccacctataactacaacatgagaggaggtgcttatcccccgaggtacttttacccatttccagttccacctttactttatcaagtggaactttctgtgggaggacagcaatttaatggcaaaggaaagacaagacaggctgcgaaacacgatgctgctgccaaagcgttgaggatcctgcagaatgagcccctgccagagaggctggaggtgaatggaagagaatccgaagaagaaaatctcaataaatctgaaataagtcaagtgtttgagattgcacttaaacggaacttgcctgtgaatttcgagtctttccctctgaaacaggtggcccgggagagtggcccaccccacatgaagaactttgtgaccaaggtttcggttggggagtttgtgggggaaggtgaagggaaaagcaagaagatttcaaagaaaaatgccgccatagctgttcttgaggagctgaagaagttaccgcccctgcctgcagttgaacgagtaaagcctagaatcaaaaagaaaacaaaacccatagtcaagccacagacaagcccagaatatggccaggggatcaatccgattagccgactggcccagatccagcaggcaaaaaaggagaaggagccagagtacacgctcctcacagagcgaggcctcccgcgccgcagggagtttgtgatgcaggtgaaggttggaaaccacactgcagaaggaacgggcaccaacaagaaggtggccaagcgcaatgcagccgagaacatgctggagatccttggtttcaaagtcccgcaggcgcagcccaccaaacccgcactcaagtcagaggagaagacacccataaagaaaccaggggatggaagaaaagtaaccttttttgaacctggctctggggatgaaaatgggactagtaataaagaggatgagttcaggatgccttatctaagtcatcagcagctgcctgctggaattcttcccatggtgcccgaggtcgcccaggctgtaggagttagtcaaggacatcacaccaaagattttaccagggcagctccgaatcctgccaaggccacggtaactgccatgatagcccgagagttgttgtatgggggcacctcgcccacagccgagaccattttaaagaataacatctcttcaggccacgtaccccatggacctctcacgagaccctctgagcaactggactatctttccagagtccagggattccaggttgaatacaaagacttccccaaaaacaacaagaacgaatttgtatctcttatcaattgctcctctcagccacctctgatcagccatggtatcggcaaggatgtggagtcctgccatgatatggctgcgctgaacatcttaaagttgctgtctgagttggaccaacaaagtacagagatgccaagaacaggaaacggaccaatgtctgtgtgtgggaggtgctgaaccttttctggccatgaaccattataaaatcccaacatatatactgaaaatactgaaactgctttgaaaatttggaatttctgatacctccagtgggccgagagacacggtgggtaaaggatgtgggcagcagcagggaagacaacagaaacacaaggaggcggctgtggccgggctggactgtgctggggtttgttgtgatggccactcggtgacctggcggtccctacgcaatagcagctgcctgtggggaagaagggctgcccagccagctggttctcccgggacaccagcagatccacaccctgggcacctccgtgtttggtcttttttttcccctgtgtgaaagaagaaacggcacgaccccttctcaagctggctcactcagacacattgggacaaaccctggacagccatgccagagagaggcctttgaccggccccagagctaaaagcaccagagaaaatcaaatgcttcctactcagcgtgacccaacttttctagtgtgccacggccccaccacctcctgcagtacccacaccatcaccactgctttctcttccaacagtgatctgtattcttagtttcattattttcttttgattgatatgacactatataaaattttcatttgagaatttctcaattgtatctagttaaatagcacagtttggaaacttgtctgagactgactttatcaataatctaaccgacaaagatcatatccatgtgtatgtggttagacatttttatttcattgactaacccaggacagtttcagtgatgcaaattgtgtgccctctggttcagctgaaacagtcctggactttcaaaaaccttgaataagtctcccacagttgtataaattggacaatttaggaattttaaactttagatgatcatttggttccatttttatttcatttttatttttgttaatgcaaacaggacttaaatgaactttgatctctgttttaaagattattaaaaaacattgtgtatctatacatatggctcttgaggacttagctttcactacactacaggatatgatctccatgtagtccatataaacctgcagagtgattttccagagtgctcgatactgttaattacatctccattagggctgaaaagaatgacctacgtttctgtatacagctgtgttgcttttgatgttgtgttactgtacacagaagtgtgtgcactgaggctctgcgtgtggtccgtatggaaagcctggtagccctgcgagttaagtactgcttccattcattgtttacgctggaatttttctccccatggaatgtaagtaaaacttaagtgtttgtcatcaataaatggtaatactaaatttttttgttaatttattctcaaatgccactactgctaggttggtcccctcccaacttgcccctatcctttttttatttttaagaaaaaaactttgtaatgcttgtgattccatctgggcaaaagtctgaagatctgaaataactttatatcaaaccattgatcaataaacagctactaatgaaaaaa

SEQ ID NO: 391 - DNA, 1310 bp, Homo Sapiens
aaattgagcccgcagcctcccgcttcgctctctgctcctcctgttcgacagtcagccgcatcttcttttgcgtcgccagccgagccacatcgctcagacaccatggggaaggtgaaggtcggagtcaacggatttggtcgtattgggcgcctggtcaccagggctgcttttaactctggtaaagtggatattgttgccatcaatgaccccttcattgacctcaactacatggtttacatgttccaatatgattccacccatggcaaattccatggcaccgtcaaggctgagaacgggaagcttgtcatcaatggaaatcccatcaccatcttccaggagcgagatccctccaaaatcaagtggggcgatgctggcgctgagtacgtcgtggagtccactggcgtcttcaccaccatggagaaggctggggctcatttgcaggggggagccaaaagggtcatcatctctgccccctctgctgatgcccccatgttcgtcatgggtgtgaaccatgagaagtatgacaacagcctcaagatcatcagcaatgcctcctgcaccaccaactgcttagcacccctggccaaggtcatccatgacaactttggtatcgtggaaggactcatgaccacagtccatgccatcactgccacccagaagactgtggatggcccctccgggaaactgtggcgtgatggccgcggggctctccagaacatcatccctgcctctactggcgctgccaaggctgtgggcaaggtcatccctgagctgaacgggaagctcactggcatggccttccgtgtccccactgccaacgtgtcagtggtggacctgacctgccgtctagaaaaacctgccaaatatgatgacatcaagaaggtggtgaagcaggcgtcggagggccccctcaagggcatcctgggctacactgagcaccaggtggtctcctctgacttcaacagcgacacccactcctccacctttgacgctggggctggcattgccctcaacgaccactttgtcaagctcatttcctggtatgacaacgaatttggctacagcaacagggtggtggacctcatggcccacatggcctccaaggagtaagacccctggaccaccagccccagcaagagcacaagaggaagagagagaccctcactgctggggagtccctgccacactcagtcccccaccacactgaatctcccctcctcacagttgccatgtagaccccttgaagaggggaggggcctagggagccgcaccttgtcatgtaccatcaataaagtaccctgtgctcaacc

SEQ ID NO: 392 - DNA, 4914 bp, Homo Sapiens
ctcatgggagtatgaaggagatggtaggaggctgctgcgtatgttcggacgagaggggctgggccgagaacccgctggtctactgcgatgggcacgcgtgcagcgtggccgtccaccaagcttgctatggcatcgttcaggtgccaacgggaccctggttctgccggaaatgtgaatctcaggagcgagcagccagggtgaggtgtgagctgtgcccacacaaagacggggcattgaagaggactgataatggaggctgggcacacgtggtgtgtgccctctacatccccgaggtgcaatttgccaacgtgctcaccatggagcccatcgtgctgcagtacgtgcctcatgatcgcttcaacaagacctgttacatctgcgaggagcagggccgggagagcaaggcggcctcgggagcctgcatgacctgtaaccgccatggatgtcgacaagctttccacgtcacctgtgcccaaatggcaggcttgctgtgtgaggaagaagtgctggaggtggacaacgtcaagtactgcggctactgcaaataccacttcagcaagatgaagacatcccggcacagcagcgggggaggcggaggaggcgctggaggaggaggtggcagcatggggggaggtggcagtggtttcatctctgggaggagaagccggtcagcctcaccatccacgcagcaggagaagcaccccacccaccacgagaggggccagaagaagagtcgaaaggacaaagaacgccttaagcagaagcacaagaagcggcctgagtcgccccccagcatcctcaccccgcccgtggtccccactgctgacaaggtctcctcctcggcttcctcttcctcccaccacgaggccagcacgcaggagacctctgagagcagcagggagtcaaaggggaaaaagtcttccagccatagcctgagtcataaagggaagaaactgagcagtgggaaaggtgtgagcagttttacctccgcctcctcttcttcctcctcctcttcctcctcctctggggggcccttccagcctgcagtctcgtccctgcagagctcccctgacttctctgcattccccaagctggagcagccagaggaggacaagtactccaagcccacagcccccgccccttcagcccctccttctccctcagctcccgagccccccaaggctgacctttttgagcagaaggtggtcttctctggctttgggcccatcatgcgcttctccaccaccacctccagctcaggccgggcccgggcgccctcccctggggactataagtctccccacgtcacggggtctggggcctcggcaggcacccacaaacggatgcccgcactgagtgccacccctgtgcctgctgatgagacccctgagacaggcctgaaggagaagaagcacaaagccagcaagaggagccgccatgggccaggccgtcccaagggcagccggaacaaggagggcactgggggcccagctgccccatccttgcccagtgcccagctggctggctttaccgccactgctgcctcacccttctctggaggttccctggtcagctccggcctgggaggtctgtcctcccgaacctttgggccttctgggagcttgcccagcttgagcctggagtcccccttactaggggcaggcatctacaccagtaataaggaccccatctcccacagtggcgggatgctgcgggctgtctgcagcacccctctctcctccagcctcctggggcccccagggacctcggccctgccccgcctcagccgctccccgttcaccagcaccctcccctcctcttctgcttctatctccaccactcaggtgttttctctggctggctctacctttagcctcccttctacccacatctttggaacccccatgggtgccgttaatcccctcctctcccaagctgagagcagccacacagagccagacctggaggactgcagcttccggtgtcgggggacctcccctcaggagagtctgtcttccatgtcccccatcagcagcctccccgcactcttcgaccagacagcctctgcaccctgtgggggcggccagttagacccggcggccccagggacgactaacatggagcagcttctggagaagcagggcgacggggaggccggcgtcaacatcgtggagatgctgaaggcgctgcacgcgctgcagaaggagaaccagcggctgcaagagcagatcctgagcctgacggccaaaaaggagcggctgcagattctcaacgtgcagctctctgtgcccttccctgccctgcctgctgccctgcctgccgccaacggccctgtccctgggccctatggcctgcctccccaagccggcagcagcgactccttgagcaccagcaagagccctccgggaaagagcagcctcggcctggacaactcgctgtccacttcttctgaggacccacactcaggctgcccgagccgcagcagctcgtcgctgtccttccacagcacgcccccaccgctgcccctcctccagcagagccctgccactctgcccctggccctgcctggggcccctgccccactcccgccccagccgcagaacgggttgggccgggcacccggggcagcggggctgggggccatgcccatggctgaggggctgttgggggggctggcaggcagtgggggcctgcccctcaatgggctccttggggggttgaatggggccgctgcccccaaccccgcaagcttgagccaggctggcggggcccccacgctgcagctgccaggctgtctcaacagccttacagagcagcagagacatctccttcagcagcaagagcagcagctccagcaactccagcagctcctggcctccccgcagctgaccccggaacaccagactgttgtctaccagatgatccagcagatccagcagaaacgggagctgcagcgcctgcagatggctgggggctcccagctgcccatggccagcctgctggcaggaagctccaccccgctgctgtctgcgggtacccctggcctgctgcccacagcgtctgctccacccctgctgcccgctggagccctagtggctccctcgcttggcaacaacacaagtctcatggccgcagcagctgcagctgcagcagtagcagcagcaggcggacctccagtcctcactgcccagaccaaccccttcctcagcctgtcgggagcagagggcagtggcggtggccccaaaggagggaccgctgacaaaggagcctcagccaaccaggaaaaaggctaaatccacccttacccctcctgacccccccaagtggagggaacagatcctggcctgaggggtcctagcctggagcaggcgcctgcgcccagaccctggagagccttgacccagagcctgtgctgaggtccagggagtgtggagagctcctggtgtcgaggactgagactgagaggggagccccctccatctggcccccttccctttccgcactgtccgctttgtgaggctcagaggaaggacagtctgcaagcccgcctaggaggtccatccccagcaaatgttttggaggtccccccagagagcagagtgggccatggcagaagtagggggttggttggacctgtcacatgaaatggatcagcacttgaatggggagaagtggagggagaggccctgggcctgtccctgcggggaaatcttttatggaagaagggctggacccactttacctgcagtttcttcccagctcgggcagatggcagaagggaccccttggactttttctcgccatccctccccccagcgcaggggcacaagctgagcttgtaaaagcccacagatgttgggggctggagaaggggcaggagagcatcacactcagccccagcctcctcaacctcttggggccccgtgatggggaggagagggcaggtgcggggaggctctggccttccttggtgccccgccctttgtttgcactattggacttaggagtgccgagggtggggagatggagctgcccgtctcagtgtgtgagtgtgtgtgtgcgtgcatgtgtgtgtgtgtgtgtgtgtgtgtgtgtgtctgtctgcctgtctctctcctcctggacccagggcagccaagggcagggataggcgcagtggtcagatgaagcagcgccagagaggggacctcccagctcttatttgcaccctccccacctcaccaactttggtccctctctgggggcatgaatggttaacaaacaccagagcagtactccaatattggagagtcgctgggggcacagggctttgaatcagggtagtatcctgccttccctcccctgaccccacatggtctcagggcccccttagggccccctaccccactgatagcttcctccttctctggcacaaggggagccccagggcttgggggagggcgtaaggtggggggaaatgccactgcttttagcaaaagcctccctcccagaattagccagcttgcctcctgcaccccacccccaccaaccaggggagccactaagctgactaacaactgtcccctcacccaccagctatttccccagggtagagtgggcaattctcaccttcaaagagtccccgcctgcccaggcctttggcacagaggctgagtggacagtcaggagagaggcgagaggcaaggcgaagcctgtgtccctgtttcagttgcactggggttggagcccagggtaggggtttccagcttccccaggctccggccttgtcagtctctttgcatgtgtggatttttctgtgtgtgtttctgtttgggtttttgttgttgggttttttttttttttttaataaagaaaagaagatgtgtatatttttggcaacgacaaaaaaaaaaaaaaaaaaaaaaaaaaaaaaaa

SEQ ID NO: 393 - DNA, 1786 bp, Homo Sapiens
gtacgccgattccatatgggcgccggcgcggagcgccgcggggcagcgcggggtcgccatggctgagctgcagcagctccgggtgcaggaggcgatggagtccatggtgaagagtctggaaagagagaacatccggaagatgcagggtctcatgttccggtgcagcgccagctgttgtgaggacagccaggcctccatgaagcaggtgcaccagtgcatcgagcgctgccatgtgcctctggctcaagcccaggctttggtcaccagtgagctggagaagttccaggaccgcctggcccggtgcaccatgcattgcaatgacaaagccaaagattcaatagatgctgggagtaaggagcttcaggtgaagcagcagctggacagttgtgtgaccaagtgtgtggatgaccacatgcacctcatcccaactatgaccaagaagatgaaggaggctctcttatcaattggaaaataaaagtatttgccagtggccatcaggctgagggcaagaatatattttttataaggaattgggaattttagtcttttaagcaaagtttacgaatgaagaaatgaaggatggccacaagcgtaaggcatatgtcacttgcctctggacactggttattttatgtttcagtccctaaaaaatgaaatggaaaaaagtggtgctaaatcgagtcagagatattacaggagagttttagagcttattatttcctgtggccagtgcttgtcctggcagtaaggctctcccctgtaacaagccagagccctccaaggtaccagactcttcttactacacaggtactaacaggctggcaggttagagttggtggagtctgaggagagatattttctctttgttgccaacatcctgtttaccaaaagtgtcaccccaccatcttccataagctgtgaaacaaaatcaatgaggtcactaacttagaagggaaagaaagttttctgggtctttgttttcttgatttggggtaatttatacaagggcatacaagttgattttaagatgtggaactgggaggtagactagtttggataagaactttgaaatgttccttgtggatccccatttctggtcatcaagatgtggatgtacatttcttaaaattattacatgctgcatctttcagcctggagactgtgcagaaacatgagaggtgatgacacactaattatgggaagcagaattactggctgatggcccctgaggctgtgtgtaacaaaatgacaggacaatcttgcagtaacactttccccttgaagagaagggggttttgattgtgatatatactagtatctaggaatgaacagtaaaagaggagcagttggctacttgattacaacagagtaaatgaagtactggatttgggaaaacctggttttattagaacatatggaatgaaagcctacacctagcattgcctacttagccccctgaattaacagagcccaattgagacaaacccctggcaacaggaaattcaagggagaaaaagtaagcaacttgggctaggatgagctgactcccttagagcaaaggagagacagcccccattaccaaataccatttttgcctggggcttgtgcagctggcagtgttcctgccccagcatggcaccttattgttttgatagcaacttcgttgaattttcaccaacttattacttgaaattataatatagcctgtccgtttgctgtttccaggctgtgatatattttcctagtggtttgactttaaaaataaataaggtttaattttctcccc

SEQ ID NO: 394 - DNA, 1717 bp, Homo Sapiens
ccggggcggatcggaagttgctttgttttgcttcgagatggctgcggggatgtatttggaacattatctggacagtattgaaaaccttccctttgaattacagagaaactttcagctcatgagggacctagaccaaagaacagaggacctgaaggctgaaattgacaagttggccactgagtatatgagtagtgcccgcagcctgagctccgaggaaaaattggcccttctcaaacagatccaggaagcctatggcaagtgcaaggaatttggtgacgacaaggtgcagcttgccatgcagacctatgagatggtggacaaacacattcggcggctggacacagacctggcccgttttgaggctgatctcaaggagaaacagattgagtcaagtgactatgacagctcttccagcaaaggcaaaaagagccggactcaaaaggagaagaaagctgctcgtgctcgttccaaagggaaaaactcggatgaagaagcccccaagactgcccagaagaagttaaagctcgtgcgcacaagtcctgagtatgggatgccctcagtgacctttggcagtgtccacccctctgatgtgttggatatgcctgtggatcccaacgaacccacctattgcctttgtcaccaggtctcctatggagagatgattggctgtgacaaccctgattgttccattgagtggttccattttgcctgtgtggggctgacaaccaagcctcgggggaaatggttttgcccacgctgctcccaagaacggaagaagaaatagataagggccttggattccaacacagtttcttccacatcccctgacttgggctagtgggcagaggaatgcctgtgctggggccaggggttcagggaggagtggatggcacagtgctgtcatcccttctcctcccctctccccactcccggtgctgaggctgcatcagaccctggtagggaggggtgccgcagccactaacggtatgtgctctccttcagccctctcccttcggagggacgtggtcttgcccactgtccttttgcctccatgctgaggtcggtgctgtatttcagagggagggtccttttcattctccttgctttgtatttaaggactggggcatagcatgggggcagtcccccagacctcttcattccccctcctgtggtgagggctaggtgtgatcaacacttttcttctccattcccttcctgcttttttcatggtgggggatccaccaggtcatctaggctctggccctagttgaaggggcaccccttcctctgtgccaagaggattcatcctgggagagggggcaaggtggaatgcagataactcacatgtaaaaggaacttgggtaggtaaataaaagctatacatgttggcctgctgtgtttattgtagagacactgttttagtaaacatgctgagcattcattttgcgtcctctgggttggatgcaatgtgagaggatggcatgccagaattaggacacgacatgaaaccagagtggtgcctctgtccgagaacttgtaagttctcaacttgggaaagacagaggtgctggagggtaggcctcagaccagggggtctccaaaactttgtaaatcatgcatcttttctccataaaacatctttcacttaatttccaataaatgatgtatttgtgctatacatacgtactgctatactataaaaaaaaaaaaaaaaaaa

SEQ ID NO: 395 - DNA, 3163 bp, Homo Sapiens
ctcttccgccgtcgtcgccgccatcctcggcgcgactcgcttctttcggttctacctgggagaatccaccgccatccgccaccatggtgaacttcacggtagaccagatccgcgccatcatggacaagaaggccaacatccgcaacatgtctgtcatcgcccacgtggaccatggcaagtccacgctgacagactccctggtgtgcaaggcgggcatcatcgcctcggcccgggccggggagacacgcttcactgatacccggaaggacgagcaggagcgttgcatcaccatcaagtcaactgccatctccctcttctacgagctctcggagaatgacttgaacttcatcaagcagagcaaggacggtgccggcttcctcatcaacctcattgactcccccgggcatgtcgacttctcctcggaggtgactgctgccctccgagtcaccgatggcgcattggtggtggtggactgcgtgtcaggcgtgtgcgtgcagacggagacagtgctgcggcaggccattgccgagcgcatcaagcctgtgctgatgatgaacaagatggaccgcgccctgctggagctgcagctggagcccgaggagctctaccagactttccagcgcatcgtggagaacgtgaacgtcatcatctccacctacggcgagggcgagagcggccccatgggcaacatcatgatcgatcctgtcctcggtaccgtgggctttgggtctggcctccacgggtgggccttcaccctgaagcagtttgccgagatgtatgtggccaagttcgccgccaagggggagggccagttggggcctgccgagcgggccaagaaagtagaggacatgatgaagaagctgtggggtgacaggtactttgacccagccaacggcaagttcagcaagtcagccaccagccccgaagggaagaagctgccacgcaccttctgccagctgatcctggaccccatcttcaaggtgtttgatgcgatcatgaatttcaagaaagaggagacagcaaaactgatagagaaactggacatcaaactggacagcgaggacaaggacaaagaaggcaaacccctgctgaaggctgtgatgcgccgctggctgcctgccggagacgccttgttgcagatgatcaccatccacctgccctcccctgtgacggcccagaagtaccgctgcgagctcctgtacgaggggcccccggacgacgaggctgccatgggcattaaaagctgtgaccccaaaggccctcttatgatgtatatttccaaaatggtgccaacctccgacaaaggtcggttctacgcctttggacgagtcttctcggggctggtctccactggcctgaaggtcaggatcatggggcccaactatacccctgggaagaaggaggacctctacctgaagccaatccagagaacaatcttgatgatgggccgctacgtggagcccatcgaggatgtgccttgtgggaacattgtgggcctcgtgggcgtggaccagttcctggtgaagacgggcaccatcaccaccttcgagcacgcgcacaacatgcgggtgatgaagttcagcgtcagccctgttgtcagagtggccgtggaggccaagaacccggctgacctgcccaagctggtggaggggctgaagcggctggccaagtccgaccccatggtgcagtgcatcatcgaggagtcgggagagcatatcatcgcgggcgccggcgagctgcacctggagatctgcctgaaggacctggaggaggaccacgcctgcatccccatcaagaaatctgacccggtcgtctcgtaccgcgagacggtcagtgaagagtcgaacgtgctctgcctctccaagtcccccaacaagcacaaccggctgtacatgaaggcgcggcccttccccgacggcctggccgaggacatcgataaaggcgaggtgtccgcccgtcaggagctcaagcagcgggcgcgctacctggccgagaagtacgagtgggacgtggctgaggcccgcaagatctggtgctttgggcccgacggcaccggccccaacatcctcaccgacatcaccaagggtgtgcagtacctcaacgagatcaaggacagtgtggtggccggcttccagtgggccaccaaggagggcgcactgtgtgaggagaacatgcggggtgtgcgcttcgacgtccacgacgtcaccctgcacgccgacgccatccaccgcggagggggccagatcatccccacagcacggcgctgcctctatgccagtgtgctgaccgcccagccacgcctcatggagcccatctaccttgtggagatccagtgtccagagcaggtggtcggtggcatctacggggttttgaacaggaagcggggccacgtgttcgaggagtcccaggtggccggcacccccatgtttgtggtcaaggcctatctgcccgtcaacgagtcctttggcttcaccgctgacctgaggtccaacacgggcggccaggcgttcccccagtgtgtgtttgaccactggcagatcctgcccggagaccccttcgacaacagcagccgccccagccaggtggtggcggagacccgcaagcgcaagggcctgaaagaaggcatccctgccctggacaacttcctggacaaattgtaggcggcccttcctgcagcgcctgccgccccggggactcgcagcacccacagcaccacgtcctcgaattctcagacgacacctggagactgtcccgacacagcgacgctcccctgagaggtttctggggcccgctgcgtgccatcactcaaccataacacttgatgccgtttctttcaatatttatttccagagtccggaggcagcagacacgccctcttagtagggacttaatgggccggtcggggagggggaggcgggatgggacacccaacactttttccatttcttcagagggaaactcagatgtccaaactaattttaacaaacgcattaagaggtttatttgggtacatggcccgcagtggcttttgccccagaaaggggaaaggaacacgcgggtagatgatttctagcaggcaggaagtcctgtgcggtgtcaccatgagcacctccagctgtactagtgccattggaataataaatttgataaggtggtgaaaaaa

SEQ ID NO: 396 - DNA, 1434 bp, Homo Sapiens
ggggaagtcgaggcgggagtgactctgcttccgtttctggttttgctctagtgtttgggtttcttcgcggctgctcaagatgaaccgactcttcgggaaagcgaaacccaaggctccgccgcccagcctgactggctgcattggcacggtggacagtagagcagaatccattgacaagaagatttctcgattggatgctgagctagtgaagtataaggatcagatcaagaagatgagagagggtcctgcaaagaatatggtcaagcagaaagccttgcgagttttaaagcaaaagaggatgtatgagcagcagcgggacaatcttgcccaacagtcattcaacatggaacaagccaattataccatccagtctttgaaggacaccaagaccacggttgatgctatgaaactgggagtaaaggaaatgaagaaggcatacaagcaagtgaagatcgaccagattgaggatttacaagaccagctagaggatatgatggaagatgcaaatgaaatccaagaagcactgagtcgcagttatggcaccccagaactggatgaagatgatttagaagcagagttggatgcactaggtgatgagcttctggctgatgaagacagttcttatttggatgaggcagcatctgcacctgcaattccagaaggtgttcccactgatacaaaaaacaaggatggagttctggtggatgaatttggattgccacagatccctgcttcatagatttgcatcattcaagcatatcttgtaaaacaaacacatattatgggactaggaaatatttatctttccaaatttgccataacagatttaggtttctttcctttctttgaaggaaagtttaattacattgctcttttattttttccattaagagactcattgcttgggaaatgctttcttcgtactaaaatttgattcctttttttcttatgaaaaacgaactcagtttaaaagtatttttagctcgtatgacttgttttcattcattaataataatttgaaataaaactaaggaaatggaatcttaaaagtctatgacagtgtaactctacagtctcaaaatgacctgataaattgataagacaaagatgagattattggggctgttcatattatgattcagaatcattttctattgtggtattataggttggttaaagtgatggcctttttgatgggttttgttgtgtcttgtgaacaagtcgttactgtgtccattattggaatggaattatcactactgtatcatgagtgggtattttgattctatggttccctcagtattacatcttgacttgtaatcaattatgaatatttcttgatatttaatgtataggacatttatttatactcaataaatatttttcaaaaggaaaaaaaaaaaaatcaaaaaaaaaaaaaaaaaaaaaaaaaaa

SEQ ID NO: 397 - DNA, 1648 bp, Homo Sapiens
ggaagttccggcgggggcggccgagggggaagagtgtgtctgcgggagaaagaggagaatcgcccaagcggcctcggaagtcccagggagtggaggcccccgccgtggagccgtgtggtgtatgtgtggtaacaccatgtctgtgcccctgctcaccgatgctgccaccgtgtctggagctgagcgggaaacggccgcggttatttttttacatggacttggagacacagggcacagctgggctgacgccctctccaccatccggctccctcacgtcaagtacatctgtccccatgcgcctaggatccctgtgaccctcaacatgaagatggtgatgccctcctggtttgacctgatggggctgagtccagatgccccagaggacgaggctggcatcaagaaggcagcagagaacatcaaggccttgattgagcatgaaatgaagaacgggatccctgccaatcgaatcgtcctgggaggcttttcacagggcggggccctgtccctctacacggccctcacctgcccccaccctctggctggcatcgtggcgttgagctgctggctgcctctgcaccgggccttcccccaggcagctaatggcagtgccaaggacctggccatactccagtgccatggggagctggaccccatggtgcccgtacggtttggggccctgacggctgagaagctccggtctgttgtcacacctgccagggtccagttcaagacatacccgggtgtcatgcacagctcctgtcctcaggagatggcagctgtgaaggaatttcttgagaagctgctgcctcctgtctaactagtcgctggccccagtgcagtaccccagctcatgggggactcagcaagcaagcgtggcaccatcttggatctgagccggtcgagcccctgtccccacccttcctgacctgtccttttcccacaggcctctgggggcaggtggcaaggcctggccgggccttccttcctggccttagccacctggctctgtctgcagcaggggcaggctgctttcttatccatttccctggaggcgggcccccctggcagcagtattggaggggctacaggcagctggagaaaggggcccagccgctgacccactcactcaggacctcactcactagccccgctttgggccccctcctgtgacctcagggtttggcccatggggcccccccaggcccctgccccaactgattctgcccagataatcgtgtctcctgcctccactcagctgcttctcagtcatgaatgtggccatggccccggggtccccttgctgctgtgggctccctgtccctgggcaggagtgctggtgaggaggtggagccttttgaggggggccttccctcagctgtttccccacactggggggctgggccctgcctccccgttaccctccttccctgcaggcctggagcctgtagggctggactgaggttcaggtctccccccagctgtctcacccccactttgtccccactctagagcagggaggcagtgggggaggagttgtgtctcgtcttctgtctccatgtggtttttgggtgtttttcttgttgtgtcctggattccgataaaattaaagaaattgcttcctcaaaaaaaaaaaaaaaaaaaaaaaaaa

SEQ ID NO: 398 - DNA, 4914 bp, Homo Sapiens
cccgggccggggcacggagagagccgagcgccgcagccgtgagccgaatagagccggagagacccgagtatgaccggagaagcccaggccggccggaagaggagccgagcgcggccggaaggaaccgagcccgtccgaagggagcggagcgcagcctggcctggggcccggtcgagcccgcgccatggcggccgaggcgacagctgtggccggaagcggggctgttggcggctgcctggccaaagacggcttgcagcagtctaagtgcccggacactaccccaaaacggcggcgcgcctcgtcgctgtcgcgtgacgccgagcgccgagcctaccaatggtgccgggagtacttgggcggggcctggcgccgagtgcagcccgaggagctgagggtttaccccgtgaggtgggaggtcaggggtcagcctctccggtgcgcggatcggggtcaggggtcagccgcggggccctcaggatgctccatgttttcgcccccctcttgcgcccgcgcctggggcggggcggggccggcctggccgggagggggccggggccgcggcaggtagggccggccgcgggctgagcgcgcctggtgtgggtctgcagcggaggcctcagcaacctgctcttccgctgctcgctcccggaccacctgcccagcgttggcgaggagccccgggaggtgcttctgcggctgtacggagccatcttgcaggtgaggggggtgtgagcgccgcagcaccagtggctttagggcctgtcgcttacgcgatgcgggtagtattgttcccgttgcgcagttgaggacaccgaggttcacggtctgagtaacacctcattacaccgaagcctgggcctgtattcccagagctttgggaggctgaggcgagaggatcacttgagcacaggagttcgagaccagcctggacaacatagtgagacccccatctctaaataaaaatagaccaacgctaaagcctgtgctccagagcctccaggcaattggatcagaagtcgcagctctggtgggaggaaggcgagccctcatgtgtgtccctgtgccactttgccttggcccctttgctgtccatcctttttcagggcgtggactccctggtgctagaaagcgtgatgttcgccatacttgcggagcggtcgctggggccccagctgtacggagtcttcccagagggccggctggaacagtacatcccaagtcggccattgaaaactcaagagcttcgagagccagtgttgtcagcagccattgccacgaagatggcgcaatttcatggcatggagatgcctttcaccaaggagccccactggctgtttgggaccatggagcggtacctaaaacagatccaggacctgcccccaactggcctccctgagatgaacctgctggagatgtacagcctgaaggatgagatgggcaacctcaggaagttactagagtctaccccatcgccagtcgtcttctgccacaatgacatccaggaaggtaggagaaggcatctgagtctcctaacccaagatggaagagccagagggctctggagtgagcagaacctcaccccattcccccagggaacatcttgctgctctcagagccagaaaatgctgacagcctcatgctggtggacttcgagtacagcagttataactataggggctttgacattgggaaccatttttgtgagtgggtttatgattatactcacgaggaatggcctttctacaaagcaaggcccacagactaccccactcaagaacagcagttgcattttattcgtcattacctggcagaggcaaagaaaggtgagaccctctcccaagaggagcagagaaaactggaagaagatttgctggtagaagtcagtcggtatgctctggcatcccatttcttctggggtctgtggtccatcctccaggcatccatgtccaccatagaatttggttacttggactatgcccagtctcggttccagttctacttccagcagaaggggcagctgaccagtgtccactcctcatcctgactccaccctcccactccttggatttctcctggagcctccagggcaggaccttggagggaggaacaacgagcagaaggccctggcgactgggctgagcccccaagtgaaactgaggttcaggagaccggcctgttcctgagtttgagtgccgaccaacccccaggatggcggaagctcaccaggccgtggccttccagttcacggtgaccccagacggggtcgacttccggctcagtcgggaggccctgaaacacgtctacctgtctgggatcaactcctggaagaaacgcctgatccgcatcaagaatggcatcctcaggggcgtgtaccctggcagccccaccagctggctggtcgtcatcatggcaacagtgggttcctccttctgcaacgtggacatctccttggggctggtcagttgcatccagagatgcctccctcaggggtgtggcccctaccagaccccgcagacccgggcacttctcagcatggccatcttctccacgggcgtctgggtgacgggcatcttcttcttccgccaaaccctgaagctgcttctctgctaccatgggtggatgtttgagatgcatggcaagaccagcaacttgaccaggatctgggctatgtgtatccgccttctatccagccggcaccctatgctctacagcttccagacatctctgcccaagcttcctgtgcccagggtgtcagccacaattcagcggtacctagagtctgtgcgccccttgttggatgatgaggaatattaccgcatggagttgctggccaaagaattccaggacaagactgcccccaggctgcagaaatacctggtgctcaagtcatggtgggcaagtaactatgtgagtgactggtgggaagagtacatctaccttcgaggcaggagccctctcatggtgaacagcaactattatgtcatggaccttgtgctcatcaagaatacagacgtgcaggcagcccgcctgggaaacatcatccacgccatgatcatgtatcgccgtaaactggaccgtgaagaaatcaagcctgtgatggcactgggcatagtgcctatgtgctcctaccagatggagaggatgttcaacaccactcggatcccgggcaaggacacagatgtgctacagcacctctcagacagccggcacgtggctgtctaccacaagggacgcttcttcaagctgtggctctatgagggcgcccgtctgctcaagcctcaggatctggagatgcagttccagaggatcctggacgacccctccccacctcagcctggggaggagaagctggcagccctcactgcaggaggaagggtggagtgggcgcaggcacgccaggccttctttagctctggaaagaataaggctgccttggaggccatcgagcgtgccgctttcttcgtggccctggatgaggaatcctactcctatgaccccgaagatgaggccagcctcagcctctatggcaaggccctgctacatggcaactgctacaacaggtggtttgacaaatccttcactctcatttccttcaagaatggccagttgggtctcaatgcagagcatgcgtgggcagatgctcccatcattgggcacctctgggagtttgtcctgggcacagacagcttccacctgggctacacggagaccgggcactgcctgggcaaaccgaaccctgcgctcgcacctcctacacggctgcagtgggacattccaaaacagtgccaggcggtcatcgagagttcctaccaggtggccaaggcgttggcagacgacgtggagttgtactgcttccagttcctgccctttggcaaaggcctcatcaagaagtgccggaccagccctgatgcctttgtgcagatcgcgctgcagctggctcacttccgggggtaagttctgcctgacctatgaggcctcaatgaccagaatgttccgggagggacggactgagactgtgcgttcctgtaccagcgagtccacagcctttgtgcaggccatgatggaggggtcccacacaaaagcagacctgcgagatctcttccagaaggctgctaagaagcaccagaatatgtaccgcctggccatgaccggggcagggatcgacaggcacctcttctgcctttacttggtctccaagtacctaggagtcagctctcctttccttgctgaggtgctctcggaaccctggcgtctctccaccagccagatcccccaatcccagatccgcatgttcgacccagagcagcaccccaatcacctgggcgctggaggtggctttggccctgtagcagatgatggctatggagtttcctacatgattgcaggcgagaacacgatcttcttccacatctccagcaagttctcaagctcagagacgaacgcccagcgctttggaaaccacatccgcaaagccctgctggacattgctgatcttttccaagttcccaaggcctacagctgaaggttggagaaatgccagctgccctttcgtccccacactgtggaggaagggacctgtggcagctcacaggcatgaggggtggccgtgcacaggtgcccaggctccaaggacagctccggcagcaggtcctcgctgggcagatgctgctccctgagggcccaggtggtggagcccttaggtacctgtgttttgtttgggaactcggaggccctccccctcccccagctcagaccacagaggtggcaagagaagggctgaagctggaagactgttcatgagggacttgtgtgacctgctttgaaatgtgtgactctgctgagtgacgtaggctctgagatagctgtccacgcccacgtgtttgcttggaataaatacttgcctcagaaccttca

SEQ ID NO: 399 - DNA, 2498 bp, Homo Sapiens
cgccgcgcttcctcctgaaggtgactgcgcccgcggggacgcagggggcggggcccgggtcgcccggagccgggattgggcagagggcggggcggcggagggattgcggcggcccgcagcgggataaccttgaggctgaggcagtggctccttgcacagcagctgcacgcgccgtggctccggatctcttcgtctttgcagcgtagcccgagtcggtcagcgccggaggacctcagcagccatgtcgaagccccatagtgaagccgggactgccttcattcagacccagcagctgcacgcagccatggctgacacattcctggagcacatgtgccgcctggacattgattcaccacccatcacagcccggaacactggcatcatctgtaccattggcccagcttcccgatcagtggagacgttgaaggagatgattaagtctggaatgaatgtggctcgtctgaacttctctcatggaactcatgagtaccatgcggagaccatcaagaatgtgcgcacagccacggaaagctttgcttctgaccccatcctctaccggcccgttgctgtggctctagacactaaaggacctgagatccgaactgggctcatcaagggcagcggcactgcagaggtggagctgaagaagggagccactctcaaaatcacgctggataacgcctacatggaaaagtgtgacgagaacatcctgtggctggactacaagaacatctgcaaggtggtggaagtgggcagcaagatctacgtggatgatgggcttatttctctccaggtgaagcagaaaggtgccgacttcctggtgacggaggtggaaaatggtggctccttgggcagcaagaagggtgtgaaccttcctggggctgctgtggacttgcctgctgtgtcggagaaggacatccaggatctgaagtttggggtcgagcaggatgttgatatggtgtttgcgtcattcatccgcaaggcatctgatgtccatgaagttaggaaggtcctgggagagaagggaaagaacatcaagattatcagcaaaatcgagaatcatgagggggttcggaggtttgatgaaatcctggaggccagtgatgggatcatggtggctcgtggtgatctaggcattgagattcctgcagagaaggtcttccttgctcagaagatgatgattggacggtgcaaccgagctgggaagcctgtcatctgtgctactcagatgctggagagcatgatcaagaagccccgccccactcgggctgaaggcagtgatgtggccaatgcagtcctggatggagccgactgcatcatgctgtctggagaaacagccaaaggggactatcctctggaggctgtgcgcatgcagcacctgatagctcgtgaggctgaggcagccatgttccaccgcaagctgtttgaagaacttgtgcgagcctcaagtcactccacagacctcatggaagccatggccatgggcagcgtggaggcttcttataagtgtttagcagcagctttgatagttctgacggagtctggcaggtctgctcaccaggtggccagataccgcccacgtgcccccatcattgctgtgacccggaatccccagacagctcgtcaggcccacctgtaccgtggcatcttccctgtgctgtgcaaggacccagtccaggaggcctgggctgaggacgtggacctccgggtgaactttgccatgaatgttggcaaggcccgaggcttcttcaagaagggagatgtggtcattgtgctgaccggatggcgccctggctccggcttcaccaacaccatgcgtgttgttcctgtgccgtgatggaccccagagcccctcctccagcccctgtcccacccccttcccccagcccatccattaggccagcaacgcttgtagaactcactctgggctgtaacgtggcactggtaggttgggacaccagggaagaagatcaacgcctcactgaaacatggctgtgtttgcagcctgctctagtgggacagcccagagcctggctgcccatcatgtggccccacccaatcaagggaagaaggaggaatgctggactggaggcccctggagccagatggcaagagggtgacagcttcctttcctgtgtgtactctgtccagttcctttagaaaaaatggatgcccagaggactcccaaccctggcttggggtcaagaaacagccagcaagagttaggggccttagggcactgggctgttgttccattgaagccgactctggccctggcccttacttgcttctctagctctctaggcctctccagtttgcacctgtccccaccctccactcagctgtcctgcagcaaacactccaccctccaccttccattttcccccactactgcagcacctccaggcctgttgctatagagcctacctgtatgtcaataaacaacagctgaagcaccaaaaaaaaaaaaaaaaaaaaaaaaaaaaaaaaaaaaaaaa

SEQ ID NO: 400 - DNA, 2795 bp, Homo Sapiens
gggcggctgggaccggcctggggtagctgcgcagcaggtgggtcggtcccggggatgcagcgcgggggtcagagagcgaccccaacagggtagacggtgaggacgcctcagtgggcagcgttagggaaaggggccagggtgttcccggggttggggtgcgagcccccgctgtgcgtccaggaggccgagggtctggcatcccttcgcgtggagtgcggggcaggggccgggtccccccggaggtggctgagatccagatcggtgaggggccctgcaggcaggtctgtgggttctggcaccacctgagcccactgggcatctggtcatccctggcacctctcctttggagccaccttgtccctggctagacagtcacattttccagtgccgttttggaaagatgttgcctttggagaaggcgtttgcctcccccaggagctccccagccccgccggatctgcccacgccggggtcagcagccggagtccagcaggaagaacccgagaccatccctgagaggacccctgctgacctggagttctcccgcctgcgtttccgggaatttgtctaccaggaggctgccgggccccaccagaccctggcccggctgcatgagctgtgccgccagtggctgatgcctgaggcgcgctccaaggagcagatgctggagctgctggtgctggagcagttcctgggcatcctgcctgataaggtccggccctgggtggtggcacagtaccctgagagctgcaagaaggcagcctccctggtggagggcctcgctgatgtcctggaagagccagggatgctgctgggctcccctgcgggctcatcctcaattcttagcgatggagtgtacgagaggcacatggaccctctgctgctaccaggcgagctcgcgagccccagccaggcccttggagctggggagatcccggcaccttctgagacaccctggctttctccggaccccctgtttctggaacagaggagggtcagagaagcaaagaccgaagaggacggccctgccaacaccgagcagaagctgaagtcctttccagaggaccctcagcacctgggggagtggggccacctggaccctgccgaggagaacctgaagagctaccggaagctgctcctgtgggggtatcagctttcccagcctgacgctgcctccaggctggacactgaggaactccggttggtggaaagagatccacaaggaagcagcctcccagaaggcgggaggcggcaggagagcgctgggtgcgcctgcgaggaggccgcccccgcgggggtgctgcctgagctgcctacggaggcgccccctggggacgcccttgccgatcccccgtcgggcaccactgaggaggaggaagagcagcctgggaaggccccggacccgcaggacccccaggacgcggagtccgactctgccaccggatcgcagaggcagtccgtcatccagcagcctgccccggacaggggcacggcgaaactgggaaccaagaggccgcaccccgaggatggggacgagcagagcctcgagggcgtctctagctccggcgacagcgcagggctggaggccgggcagggccctggggctgacgagccgggcttgtcccgcgggaagccctatgcctgcggcgagtgcggggaggccttcgcgtggctctcgcacctgatggagcaccacagcagccatggcggccggaagcgctacgcctgtcagggctgctggaagaccttccacttcagcctggccctagccgagcaccagaagacccacgagaaggagaaaagctacgcgctggggggcgcccggggcccccaaccgtccacccgcgaagcccaggcgggggctagggcgggcggtcccccagagagcgtggagggcgaggctccccccgcacccccagaggcgcagaggtgagccgctgtgctgtcccgttccggaggggccgctttgccggccgtgaatcccagacgaggcattgggcctttccacgcccctgggtggcggcttcctgtggtgtttgtggacgtcctctgcctgtgccctgaatccgctcctgaggctaagcgctcccaacgagaagggtccacgggaagccctcacctctgtaaacacaccctgggccagcgctcgcatccgaggggagccgccggatgtggaagaagactcggctttcctgcagccatttagtgccgccccatgctaggttatttgacattgtgcagtgtagagttgccttaaagtgcgtgatctgccagtgctttcttcaagtcacccttgccccgattcctcctgtttgcgctccccagggttgctcaagtggaaattttgtcagctgtttagccttttcgtacttggcgtgatgtcaacttcacttctaatctgcaaaagcagaagctgtttcctagtttacctcgcgtgtgtttacctatatggagtagctcgcagagatcacagaaatgcttgcagcctaaggcagggttttcagaccgtgggtcccagcccatttagtaaaatgggaaatcaattagcaagtggtcaccagcattacacagcaatgaagcagaataaagtaggccagaatgcatcatgtagtaaaggcaaatactgttttgtgaaacttttcacccatacatctaaatgtgagaactggttgcaatgtaagacatttcttgctgggaagttgtgagcaaaataagttgaaaacactaataaagatctgtctgtctgagcaaaggagactaaactccttgggctacataaaaaaaaaaaaaaaaaa

SEQ ID NO: 401 - DNA, 1865 bp, Homo Sapiens
cgcgagagggactttgtgttccgctgaccctcctcggggcgcttcctcccgtgccgcccttcccctcccccgccgcgtccttgcgaggcgcctcccattcggtgggaccgacccggggggatggagggggcacgcttctacaaccctcctgggaccccgaagagacgcccgcgtgcgacctgagacgccgccctcgccgagggcccatgggcgcgtccccacaggcgggcagtggacgtgagggcggcgagcggcggggccgcggcgtccaggagggccgcgctcgggctcggccccgcgcaggccgcgcgcgcgcgctcccgccgccgcccgggccgcgcccgccccgcctctaggcgccggccccggagcccggtccgcgagcagcggcggctgccggagggacgatgagctgcgcggggcgggcgggccctgcccggctcgccgcgctcgccctgctgacctgcagcctgtggccggcacgggcagacaacgcgagccaggagtactacacggcgctcatcaacgtgacggtgcaggagcccggccgcggcgccccgctcacgtttcgcatcgaccgcgggcgctacgggcttgactcccccaaggccgaggtccgcggccaggtgctggcgccgctgcccctccacggagttgctgatcatctgggctgtgatccacaaacccggttctttgtccctcctaatatcaaacagtggattgccttgctgcagaggggaaactgcacgtttaaagagaaaatatcacgggccgctttccacaatgcagttgctgtagtcatctacaataataaatccaaagaggagccagttaccatgactcatccaggcactggagatattattgctgtcatgataacagaattgaggggtaaggatattttgagttatctggagaaaaacatctctgtacaaatgacaatagctgttggaactcgaatgccaccgaagaacttcagccgtggctctctagtcttcgtgtcaatatcctttattgttttgatgattatttcttcagcatggctcatattctacttcattcagaagatcaggtacacaaatgcacgcgacaggaaccagcgtcgtctcggagatgcagccaagaaagccatcagtaaattgacaaccaggacagtaaagaagggtgacaaggaaactgacccagactttgatcattgtgcagtctgcatagagagctataagcagaatgatgtcgtccgaattctcccctgcaagcatgttttccacaaatcctgcgtggatccctggcttagtgaacattgtacctgtcctatgtgcaaacttaatatattgaaggccctgggaattgtgccgaatttgccatgtactgataacgtagcattcgatatggaaaggctcaccagaacccaagctgttaaccgaagatcagccctcggcgacctcgccggcgacaactcccttggccttgagccacttcgaacttcggggatctcacctcttcctcaggatggggagctcactccgagaacaggagaaatcaacattgcagtaacaaaagaatggtttattattgccagttttggcctcctcagtgccctcacactctgctacatgatcatcagagccacagctagcttgaatgctaatgaggtagaatggttttgaagaagaaaaaacctgctttctgactgattttgccttgaaggaaaaaagaacctatttttgtgcatcatttaccaatcatgccacacaagcatttatttttagtacattttattttttcataaaattgctaatgccaaagctttgtattaaaagaaataaataataaaataaaaagtctgtaaaaaaaaaaaaaaaaaa

SEQ ID NO: 402 - DNA, 1846 bp, Homo Sapiens
tggagcgccgttcgccggtatgtgcgcatgcgttgaggtctcttgacgccgattggggggtcacgagtcacgggcggcgtgcggcggctggtgggggcgtgtccggcggagcgggcgcggcgttacgaggccgctggttggccagcgctagtcacgtggttcctggccgcaagcgacgcgcgccggtgcgacgtcaacgcagccgggcgagttttaccgatctgtgttccgcggcccggccgcggctgagtcttcccagggtcagggtcaggcgctttgctgagtccctttgtggccgccatggacaattccgggaaggaagcggaggcgatggcgctgttggccgaggcggagcgcaaagtgaagaactcgcagtccttcttctctggcctctttggaggctcatccaaaatagaggaagcatgcgaaatctacgccagagcagcaaacatgttcaaaatggccaaaaactggagtgctgctggaaacgcgttctgccaggctgcacagctgcacctgcagctccagagcaagcacgacgcagccacctgctttgtggacgctggcaacgcattcaagaaagccgacccccaagaggccattaactgtttgatgcgagcaatcgagatctacacagacatgggccgattcacgattgcggccaagcaccacatctccattgctgagatctatgagacagagttggtggacatcgagaaggccattgcccactacgagcagtctgcagactactacaaaggcgaggagtccaacagctcagccaacaagtgtctgctgaaggtggctggttacgctgcgctgctggagcagtatcagaaggccattgacatctacgaacaggtggggaccaatgccatggacagccccctcctcaagtacagcgccaaagactacttcttcaaggcggccctctgccacttctgcatcgacatgctcaacgccaagctggctgtccaaaagtatgaggagctgttcccagctttctctgattcccgggaatgcaagttgatgaaaaaattgctagaggcccacgaggagcagaatgtggacagctacaccgagtcggtgaaggaatacgactccatctcccggctggaccagtggctcaccaccatgctgctgcgcatcaagaagaccatccagggcgatgaggaggacctgcgctaagccccacccagccccccagtgcccgtcttcctgtcccatctgctcagagagaggtggggccgagacttgctggagagcttccctcctttcccatctggggagtgccgcgggccacagtgggcaggtggcaccgggggtcagcatgcaggggcgccagaggcccaggctgctggccggacagtcaccctctgttctcgctacatcccttgccccctgtccatttatttaagcccccataggtgcccttcacccccaaaaccagctgtacagaatctttgatacagacctatttgctaggggtgctgccggggatttggggtcagcatctggccccctatctcctgaccagctgagtcatgaggccggtttctctctctctcccacttttgtcccccagccaagctctaaagcacatgtagccgctgagacctgctgtttctgctgggggcaggctcctcttcccccagccccgggagcctcccccagcttcctgcagccccgacctctcaggttagaccctgggccctggagcttaggggattctccccaccccagccccacacctgctccttccctaatgctttgaggttttcttggttggaagctgcagctggcccaagaaagaaaataaaaaacaacacttttgcatgagtcaaaa

SEQ ID NO: 403 - DNA, 2819 bp, Homo Sapiens
gctgcggagggtgcgtgcgggccgcggcagccgaacaaaggagcaggggcgccgccgcagggacccgccacccacctcccggggccgcgcagcggcctctcgtctactgccaccatgaccgccaacggcacagccgaggcggtgcagatccagttcggcctcatcaactgcggcaacaagtacctgacggccgaggcgttcgggttcaaggtgaacgcgtccgccagcagcctgaagaagaagcagatctggacgctggagcagccccctgacgaggcgggcagcgcggccgtgtgcctgcgcagccacctgggccgctacctggcggcggacaaggacggcaacgtgacctgcgagcgcgaggtgcccggtcccgactgccgtttcctcatcgtggcgcacgacgacggtcgctggtcgctgcagtccgaggcgcaccggcgctacttcggcggcaccgaggaccgcctgtcctgcttcgcgcagacggtgtcccccgccgagaagtggagcgtgcacatcgccatgcaccctcaggtcaacatctacagcgtcacccgtaagcgctacgcgcacctgagcgcgcggccggccgacgagatcgccgtggaccgcgacgtgccctggggcgtcgactcgctcatcaccctcgccttccaggaccagcgctacagcgtgcagaccgccgaccaccgcttcctgcgccacgacgggcgcctggtggcgcgccccgagccggccactggctacacgctggagttccgctccggcaaggtggccttccgcgactgcgagggccgttacctggcgccgtcggggcccagcggcacgctcaaggcgggcaaggccaccaaggtgggcaaggacgagctctttgctctggagcagagctgcgcccaggtcgtgctgcaggcggccaacgagaggaacgtgtccacgcgccagggtatggacctgtctgccaatcaggacgaggagaccgaccaggagaccttccagctggagatcgaccgcgacaccaaaaagtgtgccttccgtacccacacgggcaagtactggacgctgacggccaccgggggcgtgcagtccaccgcctccagcaagaatgccagctgctactttgacatcgagtggcgtgaccggcgcatcacactgagggcgtccaatggcaagtttgtgacctccaagaagaatgggcagctggccgcctcggtggagacagcaggggactcagagctcttcctcatgaagctcatcaaccgccccatcatcgtgttccgcggggagcatggcttcatcggctgccgcaaggtcacgggcaccctggacgccaaccgctccagctatgacgtcttccagctggagttcaacgatggcgcctacaacatcaaagactccacaggcaaatactggacggtgggcagtgactccgcggtcaccagcagcggcgacactcctgtggacttcttcttcgagttctgcgactataacaaggtggccatcaaggtgggcgggcgctacctgaagggcgaccacgcaggcgtcctgaaggcctcggcggaaaccgtggaccccgcctcgctctgggagtactagggccggcccgtccttccccgcccctgcccacatggcggctcctgccaaccctccctgctaaccccttctccgccaggtgggctccagggcgggaggcaagcccccttgcctttcaaactggaaaccccagagaaaacggtgcccccacctgtcgcccctatggactccccactctcccctccgcccgggttccctactcccctcgggtcagcggctgcggcctggccctgggagggatttcagatgcccctgccctcttgtctgccacggggcgagtctggcacctctttcttctgacctcagacggctctgagccttatttctctggaagcggctaagggacggttgggggctgggagccctgggcgtgtagtgtaactggaatcttttgcctctcccagccacctcctcccagccccccaggagagctgggcacatgtcccaagcctgtcagtggccctccctggtgcactgtccccgaaacccctgcttgggaagggaagctgtcgggtgggctaggactgacccttgtggtgtttttttgggtggtggctggaaacagcccctctcccacgtggcagaggctcagcctggctcccttccctggagcggcagggcgtgacggccacagggtctgcccgctgcacgttctgccaaggtggtggtggcgggcgggtaggggtgtgggggccgtcttcctcctgtctctttcctttcaccctagcctgactggaagcagaaaatgaccaaatcagtattttttttaatgaaatattattgctggaggcgtcccaggcaagcctggctgtagtagcgagtgatctggcggggggcgtctcagcaccctccccagggggtgcatctcagccccctctttccgtccttcccgtccagccccagccctgggcctgggctgccgacacctgggccagagcccctgctgtgattggtgctccctgggcctcccgggtggatgaagccaggcgtcgccccctccgggagccctggggtgagccgccggggcccccctgctgccagcctcccccgtccccaacatgcatctcactctgggtgtcttggtcttttattttttgtaagtgtcatttgtataactctaaacgcccatgatagtagcttcaaactggaaatagcgaaataaaataactcagtctgcagccccaaaaaaaaaaaaaaaaaaaaaaaaaaaaaaaaaaaaaaaaaaa

SEQ ID NO: 404 - DNA, 972 bp, Homo Sapiens
gattgcttatagaccggaagccgggaccttaattctctttcccatcttgcaagatggcgggtgaaaaagttgagaagccagatactaaagagaagaaacccgaagccaagaaggttgatgctggtggcaaggtgaaaaagggtaacctcaaagctaaaaagcccaagaaggggaagccccattgcagccgcaaccctgtccttgtcagaggaattggcaggtattcccgatctgccatgtattccagaaaggccatgtacaagaggaagtactcagccgctaaatccaaggttgaaaagaaaaagaaggagaaggttctcgcaactgttacaaaaccagttggtggtgacaagaacggcggtacccgggtggttaaacttcgcaaaatgcctagatattatcctactgaagatgtgcctcgaaagctgttgagccacggcaaaaaacccttcagtcagcacgtgagaaaactgcgagccagcattacccccgggaccattctgatcatcctcactggacgccacaggggcaagagggtggttttcctgaagcagctggctagtggcttattacttgtgactggacctctggtcctcaatcgagttcctctacgaagaacacaccagaaatttgtcattgccacttcaaccaaaatcgatatcagcaatgtaaaaatcccaaaacatcttactgatgcttacttcaagaagaagaagctgcggaagcccagacaccaggaaggtgagatcttcgacacagaaaaagagaaatatgagattacggagcagcgcaagattgatcagaaagctgtggactcacaaattttaccaaaaatcaaagctattcctcagctccagggctacctgcgatctgtgtttgctctgacgaatggaatttatcctcacaaattggtgttctaaatgtcttaagaacctaattaaatagctgactacaaaaaaaaaaaaaaaaaaa

SEQ ID NO: 405 - DNA, 1351 bp, Homo Sapiens
ctgggaggctgacggcccgcgggcgtaagcggactgcagccgcgagctcctggaggcggcgggatggaggcggcggccgagcctggaaacctggccggcgtcaggcacatcatcctggtcctctcaggaaaggggggcgttgggaaaagcaccatctccacggagctggccctggcactgcgccatgcaggcaagaaggtgggaatcctggatgtggacctgtgtggccccagtatcccccgcatgctcggggcgcagggcagggctgtgcaccagtgcgaccgcggctgggcacccgtcttcctggaccgggagcagagcatctcgctcatgtctgtgggcttcctgctggagaagccggacgaggccgtggtgtggagaggccccaagaaaaacgcgctgataaagcagtttgtgtccgacgtggcctggggggagctggactacctggtggtggacacgcccccggggacctccgatgagcacatggccaccatagaagccctgcgtccctaccagcccctgggggccctcgtggtcaccacgccccaggcggtgtccgtgggggacgtgaggcgcgagctgaccttctgtaggaagacgggcttgcgggtgatgggaatcgtggagaatatgagcggcttcacgtgcccacactgcacggagtgcaccagcgtcttctccaggggcggcggagaggagctggcccagctcgccggggtgcccttcttaggctccgtgcccctggaccctgcgctcatgaggactctggaggagggccacgacttcatccaggagttccccgggagccccgccttcgctgcactcacctccatagcccagaagattctggacgcgacgcccgcgtgcctcccctgactaaggccaccttgcagccgctttccagggccaccaagggctctgctccagcctctcagagaaacagaggcctgggctcggttcccgggccctgcaggggcaggcccaggcagcgtccagccggagagcttctccccgaccagcccagccccaggatgtgtcgcaccagcagctctgcctggttggcctgcagtgccgtggtctgcgtgctctgcagctgtgagacgggggcggcctgggctctcttcccatccatgttgcctacctgtgcccctggcagccgcgtgtccacacagttagcggagcgcaggacttctgcagtcctcaggtgaccccgggcctccagcaccctgggtcgctgtcatctgtgtttagctcggggcatgctccctaagggggcgaactgacctcaggcatgtcttgtaactgtagaggcgcctgccattaaacgtgtccgctgctgtggcgacag

SEQ ID NO: 406 - DNA, 1661 bp, Homo Sapiens
ccgagggcggggccgggcccgggagcctgtggcttcaggaagaggagggcaaggtgtctggctgcgcgtttggctgcaatgagctcggcctcggggctccgcagggggcacccggcaggtggggaagaaaacatgacagaaacagatgccttctataaaagagaaatgtttgatccggcagaaaagtacaaaatggaccacaggaggagaggaattgctttaatcttcaatcatgagaggttcttttggcacttaacactgccagaaaggcggggcacctgcgcagatagagacaatcttacccgcaggttttcagatctaggatttgaagtgaaatgctttaatgatcttaaagcagaagaactactgctcaaaattcatgaggtgtcaactgttagccacgcagatgccgattgctttgtgtgtgtcttcctgagccatggcgaaggcaatcacatttatgcatatgatgctaaaatcgaaattcagacattaactggcttgttcaaaggagacaagtgtcacagcctggttggaaaacccaagatatttatcattcaggcatgtcggggaaaccagcacgatgtgccagtcattcctttggatgtagtagataatcagacagagaagttggacaccaacataactgaggtggatgcagcctccgtttacacgctgcctgctggagctgacttcctcatgtgttactctgttgcagaaggatattattctcaccgggaaactgtgaacggctcatggtacattcaagatttgtgtgagatgttgggaaaatatggctcctccttagagttcacagaactcctcacactggtgaacaggaaagtttctcagcgccgagtggacttttgcaaagacccaagtgcaattggaaagaagcaggttccctgttttgcctcaatgctaactaaaaagctgcatttctttccaaaatctaattaattaatagaggctatctaattttacactctgtattgaaaatggctttctcagccaggcgtggttactcacacctgtaatcccagcactttgggagtccaaggtgggcggatcacctgaggtcgggagttcgagaccagcctgaccaacatggagaagccccgtctctactaaaaatgcaaaaaaaaatttagctaggcatggcggcgcatgcctgcaatcccagctacttggaaggctgaggcaggagaatcacttgaacccaggaggtggaggctgcggtgagccgagattgcgccattgcactccagcctgggcaacgagtgaaactccgtctcaaaaaaaagaaaatgtctttctcttccttttatataaatatcgttagggtgaagcattatggtctaatgattcaaatgttttaaagtttaatgcctagcagagaactgccttaaaaaaaaaaaaaaaaagttcatgttggccatggtgaaagggtttgatatggagaaacaaaatcctcaggaaattagataaataaaaatttataagcatttgtattattttttaataaactgcagggttacacaaaaatctagctgatttaacttgtattttgtcacttttttataaaagtttattgtttgatgtttttaaaggtttttgaaatccaggaattaaatcatcccttaataaaatattcgaaattc

SEQ ID NO: 407 - DNA, 1941 bp, Homo Sapiens
gagagggcgaaggtaggctggcagatacgttcgtcagcttgctcctttctgcccgtggacgccgccgaagaagcatcgttaaagtctctcttcaccctgccgtcatgtctaagtcagagtctcctaaagagcccgaacagctgaggaagctcttcattggagggttgagctttgaaacaactgatgagagcctgaggagccattttgagcaatggggaacgctcacggactgtgtggtaatgagagatccaaacaccaagcgctccaggggctttgggtttgtcacatatgccactgtggaggaggtggatgcagctatgaatgcaaggccacacaaggtggatggaagagttgtggaaccaaagagagctgtctccagagaagattctcaaagaccaggtgcccacttaactgtgaaaaagatatttgttggtggcattaaagaagacactgaagaacatcacctaagagattattttgaacagtatggaaaaattgaagtgattgaaatcatgactgaccgaggcagtggcaagaaaaggggctttgcctttgtaacctttgacgaccatgactccgtggataagattgtcattcagaaataccatactgtgaatggccacaactgtgaagttagaaaagccctgtcaaagcaagagatggctagtgcttcatccagccaaagaggtcgaagtggttctggaaactttggtggtggtcgtggaggtggtttcggtgggaatgacaacttcggtcgtggaggaaacttcagtggtcgtggtggctttggtggcagccgtggtggtggtggatatggtggcagtggggatggctataatggatttggtaatgatggtggttatggaggaggcggccctggttactctggaggaagcagaggctatggaagtggtggacagggttatggaaaccagggcagtggctatggcgggagtggcagctatgacagctataacaacggaggcggaggcggctttggcggtggtagtggaagcaattttggaggtggtggaagctacaatgattttgggaattacaacaatcagtcttcaaattttggacccatgaagggaggaaattttggaggcagaagctctggcccctatggcggtggaggccaatactttgcaaaaccacgaaaccaaggtggctatggcggttccagcagcagcagtagctatggcagtggcagaagattttaattaggaaacaaagcttagcaggagaggagagccagagaagtgacagggaagctacaggttacaacagatttgtgaactcagccaagcacagtggtggcagggcctagctgctacaaagaagacatgttttagacaaatactcatgtgtatgggcaaaaaactcgaggactgtatttgtgactaattgtataacaggttattttagtttctgttctgtggaaagtgtaaagcattccaacaaagggttttaatgtagatttttttttttgcaccccatgctgttgattgctaaatgtaacagtctgatcgtgacgctgaataaatgtcttttttttaatgtgctgtgtaaagttagtctactcttaagccatcttggtaaatttccccaacagtgtgaagttagaattccttcagggtgatgccaggttctatttggaatttatatacaacctgcttgggtggagaagccattgtcttcggaaaccttggtgtagttgaactgatagttactgttgtgacctgaagttcaccattaaaagggattacccaagcaaaatcatggaatggttataaaagtgattgttggcacatcctatgcaatatatctaaattgaataatggtaccagataaaattatagatgggaatgaagcttgtgtatccattatcatgtgtaatcaataaacgatttaattctcttgaaaaaaaaaaaaaaaaaa

SEQ ID NO: 408 - DNA, 2396 bp, Homo Sapiens
actctgggcggcggatccgagcgggggataccccaggagatgggggtcgaggagagaccccggggagtagagagagagaaactcactccccgagtccccgaccctccccaagcaaggttataatataacttatcctctcatgcttttttcctgccccttctccccaaatcatcaacaatagaagaagaagaaaacatgtcaggacacaaatgcagttatccctgggacttacaggatcgatatgctcaagataagtcagttgtaaataagatgcaacagaaatattgggagacgaagcaggcctttattaaagccacagggaagaaggaagatgaacatgttgttgcctctgacgcggacctggatgccaagctagagctgtttcattcaattcagagaacctgtctggacttatcgaaagcaattgtactctatcaaaagaggatatgtttcttgtctcaagaagaaaacgaactgggaaaatttcttcgatcccaaggtttccaagataaaaccagagcaggaaagatgatgcaagcgacaggaaaggccctctgcttttcttcccagcaaaggttggccttacgaaatcctttgtgtcgatttcaccaagaagtggagacttttcggcatcgggccatctcagatacttggctgacggtgaaccgcatggaacagtgcaggacggaatatagaggagcactattatggatgaaggacgtgtctcaggagcttgatccagacctctacaagcaaatggagaagttcaggaaggtacaaacacaagtgcgccttgcaaaaaaaaactttgacaaattgaagatggatgtttgtcaaaaagtggatcttcttggagcgagcagatgcaatctcttgtctcacatgctagcaacataccagaccactctgcttcatttttgggagaaaacttctcacactatggcagccatccatgagagtttcaaaggttatcaaccatatgaatttactactttaaagagcttacaagaccctatgaaaaaattagttgagaaagaagagaagaagaaaatcaaccagcaggaaagtacagatgcagccgtgcaggagccgagccaattaatttcattagaggaagaaaaccagcgcaaggaatcctctagttttaagactgaagatggaaaaagtattttatctgccttagacaaaggctctacacatactgcatgctcaggacccatagatgaactattagacatgaaatctgaggaaggtgcttgcctgggaccagtggcagggaccccggaacctgaaggtgctgacaaagatgacctgctgctgttgagtgagatcttcaatgcttcctccttggaagagggcgagttcagcaaagagtgggccgctgtgtttggagacggccaagtgaaggagccagtgcccactatggccctgggagagccagaccccaaggcccagacaggctcaggtttccttccttcgcagcttttagaccaaaatatgaaagacttacaggcctcgctacaagaacctgctaaggctgcctcagacctgactgcctggttcagcctcttcgctgacctcgacccactctcaaatcctgatgctgttgggaaaaccgataaagaacacgaattgctcaatgcatgaatctgtacccttcgggagggcactcacatgccgcccccagcagctcccctgggggctagcagaagtataaagtgatcagtatgctgttttaataattatgtgccattttaataaaatgaaagggtcaacggccctgtttatattggtataattatttactcttatttggtataaagggttttcgtgtatctctatgtggatctaaataatacaggattgtctagaagcggtttccaggccaccgctctcctgcctacatcccatcatggctgctgcggtgtcactgggctaccgtgagatccaagttgaaatcagaagcctactttgatggtaggtttgaatgacgtgtcctacagcctcagaggcagcaggaggctagcaaagcttaaatgcctccttctctgcccccagcctctgtcccccttggaggagggctgtaggaagattccctcttcctgccaagccaccttccagtgagctctggatgaagctctggccaaccaaagacactgtccccacagcaggtgcctggtgggccacgtgttctcacactggtggaggagctgggcttctgtccaaggcacaaaccttactatggaaagcagccatatttgcagataccactgtctccttttgtcctcttcgtggctggaattcaaaagcatgtatttctgaagcctcttgtgacattgttttttttttttttttaattaaacagaaaagatatttgacatgcaaaaaaaaaaaaa

SEQ ID NO: 409 - DNA, 1043 bp, Homo Sapiens
ctagcgacggccgtagggagcgcttcctcctccccgccgccgccctcgccatggccgcgccggccccgggcctcatctcggtgttctcgagttcccaggagctgggtgcggcgctagcgcagctggtggcccagcgcgcagcatgctgcctggcaggggcccgcgcccgtttcgcgctcggcctgtcgggcgggagcctcgtctcgatgctagcccgcgagctacccgccgccgtcgcccctgccgggccagctagcttagcgcgctggacgctgggcttctgcgacgagcgcctcgtgcccttcgatcacgccgagagcacgtacggcctctaccggacgcatcttctctccagactgccgatcccagaaagccaggtgatcaccattaaccccgagctgcctgtggaggaggcggctgaggactacgccaagaagctgagacaggcattccaaggggactccatcccggttttcgacctgctgatcctgggggtgggccccgatggtcacacctgctcactcttcccagaccaccccctcctacaggagcgggagaagattgtggctcccatcagtgactccccgaagccaccgccacagcgtgtgaccctcacactacctgtcctgaatgcagcacgaactgtcatctttgtggcaactggagaaggcaaggcagctgttctgaagcgcattttggaggaccaggaggaaaacccgctgcccgccgccctggtccagccccacaccgggaaactgtgctggttcttggacgaggcggccgcccgcctcctgaccgtgcccttcgagaagcattccactttgtagctggccagagggacgccgcagctgggaccaggcacgcggcccatggggctgggcccctgctggccgccactctccgggctctcctttcaaaaagccacgtcgtgctgctgctggaagccaacagcctccggccagcagccctacccggggctcaacacacaggctgtggctctggacatccggatattaaaaggagcgttgctggaaaaaaaaaaa

SEQ ID NO: 410 - DNA, 2050 bp, Homo Sapiens
atgccgcctcctgcggccgccgcgggcctcgcgggccggccggggcgaggcgcggggtctcggctgcgccccgcggtggcagctgccgggcgtcgcgcgcacatgatcagatgccgacatggtggcccccggctgcaggacatccggaacacggtgggcaacgtgcccttggagtggtacgatgacttcccccacgtgggctacgacctggatggcaggcgcatctacaagcccctgcggacccgggatgagctggaccagttcctggacaagatggacgatcctgactactggcgcaccgtgcaggacccgatgacagggcgggacctgagactgacggatgagcaggtggccctggtgcggcggctgcagagtggccagtttggggatgtgggcttcaacccctatgagccggctgtcgacttcttcagcggggacgtcatgatccacccggtgaccaaccgcccggccgacaagcgcagcttcatcccctccctggtggagaaggagaaggtctctcgcatggtgcacgccatcaagatgggctggatccagcctcgccggccccgagaccccacccccagcttctatgacctgtgggcccaggaggaccccaacgccgtgctcgggcgccacaagatgcacgtacctgctcccaagctggccctgccaggccacgccgagtcgtacaacccaccccctgaatacctgctcagcgaggaggagcgcttggcgtgggaacagcaggagccaggcgagaggaagctgagctttttgccacgcaagttcccgagcctgcgggccgtgcctgcctacggacgcttcatccaggaacgcttcgagcgctgccttgacctgtacctgtgcccacggcagcgcaagatgagggtgaatgtagaccctgaggacctcatccccaagctgcctcggccgagggacctgcagcccttccccacgtgccaggccctggtctacaggggccacagtgaccttgtccggtgcctcagtgtctctcctgggggccagtggctggtttcaggctctgacgacggctccctgcggctctgggaggtggccactgcccgctgtgtgaggactgttcccgtggggggcgtggtgaagagtgtggcctggaaccccagccccgctgtctgcctggtggctgcagccgtggaggactcggtgctgctgctgaacccagctctgggggaccggctggtggcgggcagcacagatcagctgttgagcgccttcgtcccgcctgaggagccccccttgcagccggcccgctggctggaggcctcagaggaggagcgccaagtgggcctgcggctgcgcatctgccacgggaagccagtgacgcaggtgacctggcacgggcgtggggactacctggccgtggtgctggccacccaaggccacacccaggtgctgattcaccagctgagccgtcgccgcagccagagtccgttccgccgcagccacggacaggtgcagcgagtggccttccaccctgcccggcccttcctgttggtggcgtcccagcgcagcgtccgcctctaccacctgctgcgccaggagctcaccaagaagctgatgcccaactgcaagtgggtgtccagcctggcggtgcaccctgcaggtgacaacgtcatctgtgggagctacgatagcaagctggtgtggtttgacctggatctttccaccaagccatacaggatgctgagacaccacaagaaggctctgcgggctgtggccttccacccgcggtacccactctttgcgtcaggctcggacgacggcagtgtcatcgtctgccatggcatggtgtacaatgaccttctgcagaaccccttgctggtgcccgtcaaggtgctgaagggacacgtgctgacccgagatctgggagtgctggacgtcatcttccaccccacccagccgtgggtcttctcctcgggggcagacgggactgtccgcctcttcacctagctgttctgcctgcctggggctggggtggtcgtgctgaagtcaacagagcctttaccctgtg

SEQ ID NO: 411 - DNA, 1547 bp, Homo Sapiens
ttgccgccgccgccacccccgcccaggatggcggaagtggaggcgccgacggcggccgagacggacatgaagcaatatcaaggctccggcggcgtcgccatggatgtggaacggagtcgcttcccctactgcgtggtgtggacgcccatcccggtgctcacgtggtttttccccatcatcggccacatgggcatctgcacatccacaggagtcattcgggacttcgcgggcccctactttgtctcagaggacaacatggcctttggaaagcctgccaagtactggaagttggaccctgctcaggtctatgctagcgggcccaacgcatgggacacggctgtgcacgacgcctctgaggagtacaagcaccgcatgcacaatctctgctgtgacaactgccactcgcacgtggcattggccctgaatctgatgcgctacaacaacagcaccaactggaatatggtgacgctctgcttcttctgcctgctctacgggaagtacgtcagcgttggggccttcgtgaagacctggctgcccttcatccttctcctgggcatcatcctcaccgtcagcctggtctttaacctccggtgatggctgctcggtggccccacacccaccagggtcccgaggaaacagccgccatcccttttggttccagatttttttctcctcaccccaaaaggcagggttgggcctgctgttgtggaccgggggtcggggctggcaggatggaaggactgaggaccagcatgaagtgggggtttgttgtctccctgcctctcagaagcaccctgtcccctcctccccaggcctgtgactccggccctggaagcccctttgttcttctgttgaaaggctttggcttccctctgtagagctgctcccgccaccacctgctggggtcctgcctcagcccagtgcccagtatggggagaggaggacatttgggctcacctgtcaaggtggccctgggaccagagctggtcccagcatggggtgcaccgggtacacttaacgtgtctctataagccaagttgcttcaggaccttcaccactggcctctagaatggtccagaggggctggctgggtccctttgtcagactcctgccggcagctgccctgggggacatgtgtgcccatctggcatcctccagcccgtgcagtccgctcttcactgttccacggcctcccagtgcctcccagcattggacccatctccccctgcagtttgaggccagagaggtgagtggacctgacaagtgccagagtaaccgtgtagacagagcagtgtagacagcgctcagccccagccccaggtgtggacctcatgctggtgatggctcccctgggtggcctgccagcacagccagtgccatcagggagctgaaggggctgtcccccacctaactccagctcccccttcacgttgtcaccaaggccctgtgccgcccgcctcgcccccctgctctgtggattcctttgggaagggctccctgggcaggacaataaagagttttgactccaaaaaaaaaaaaaaaaaaaa

SEQ ID NO: 412 - DNA, 1942 bp, Homo Sapiens
gcagtgcggcggtcacaggctgagtgctgcggcgcgatccttgcttccctgagcgttggcccgggaggaaagaagatggtgctggatctggatttgtttcgggtggataaaggaggggacccagccctcatccgagagacgcaggagaagcgcttcaaggacccgggactagtggaccagctggtgaaggcagacagcgagtggcgacgatgtagatttcgggcagacaacttgaacaagctgaagaacctatgcagcaagacaatcggagagaaaatgaagaaaaaagagccagtgggagatgatgagtctgtcccagagaatgtgctgagtttcgatgaccttactgcagacgctttagctaacctgaaagtctcacaaatcaaaaaagtccgactcctcattgatgaagccatcctgaagtgtgacgcggagcggataaagttggaagcagagcggtttgagaacctccgagagattgggaaccttctgcacccttctgtacccatcagtaacgatgaggatgtggacaacaaagtagagaggatttggggtgattgtacagtcaggaagaagtactctcatgtggacctggtggtgatggtagatggctttgaaggcgaaaagggggccgtggtggctgggagtcgagggtacttcttgaagggggtcctggtgttcctggaacaggctctcatccagtatgcccttcgcaccttgggaagtcggggctacattcccatttataccccctttttcatgaggaaggaggtcatgcaggaggtggcacagctcagccagtttgatgaagaactttataaggtgattggcaaaggcagtgaaaagtctgatgacaactcctatgatgagaagtacctgattgccacctcagagcagcccattgctgccctgcaccgggatgagtggctccggccggaggacctgcccatcaagtatgctggcctgtctacctgcttccgtcaggaggtgggctcccatggccgtgacacccgtggcatcttccgagtccatcagtttgagaagattgaacagtttgtgtactcatcaccccatgacaacaagtcatgggagatgtttgaagagatgattaccaccgcagaggagttctaccagtccctggggattccttaccacattgtgaatattgtctcaggttctttgaatcatgctgccagtaagaagcttgacctggaggcctggtttccgggctcaggagccttccgtgagttggtctcctgttctaattgcacggattaccaggctcgccggcttcgaatccgatatgggcaaaccaagaagatgatggacaaggtggagtttgtccatatgctcaatgctaccatgtgcgccactacccgtaccatctgcgccatcctggagaactaccagacagagaagggcatcactgtgcctgagaaattgaaggagttcatgccgccaggactgcaagaactgatcccctttgtgaagcctgcgcccattgagcaggagccatcaaagaagcagaagaagcaacatgagggcagcaaaaagaaagcagcagcaagagacgtcaccctagaaaacaggctgcagaacatggaggtcaccgatgcttgaacattcctgcctccctatttgccaggctttcatttctgtctgctgagatctcagagcctgcccaacagcagggaagccaagcacccattcatccccctgcccccatctgactgcgtagctgagaggggaacagtgccatgtaccacacagatgttcctgtctcctcgcatgggcatagggacccatcattgatgactgatgaaaccatgtaataaagcatctctggggagggcttaggactcttcctcagtcttcttccccgggcttgaaccccgaaaaaaaaaaaaaaaaaaaaaaaaaaaaaaaaaaaaaaaaaaaaaaa

SEQ ID NO: 413 - DNA, 783 bp, Homo Sapiens
atggcggggtcgccgctgctctgggggccgcgggccgggggcgtcggccttttggtgctgctgctgctcggcctgtttcggccgccccccgcgctctgcgcgcggccggtaaaggagccccgcggcctaagcgcagcgtctccgcccttggctgagactggcgctcctcgccgcttccggcggtcagtgccccgaggtgaggcggcgggggcggtgcaggagctggcgcgggcgctggcgcatctgctggaggccgaacgtcaggagcgggcgcgggccgaggcgcaggaggctgaggatcagcaggcgcgcgtcctggcgcagctgctgcgcgtctggggcgccccccgcaactctgatccggctctgggcctggacgacgaccccgacgcgcctgcagcgcagctcgctcgcgctctgctccgcgcccgccttgaccctgccgccctcgcagcccagcttgtccccgcgcccgtccccgccgcggcgctccgaccccggcccccggtctacgacgacggccccgcgggcccggatgctgaggaggcaggcgacgagacacccgacgtggaccccgagctgttgaggtacttgctgggacggattcttgcgggaagcgcggactccgagggggtggcagccccgcgccgcctccgccgtgccgccgaccacgatgtgggctctgagctgccccctgagggcgtgctgggggcgctgctgcgtgtgaaacgcctagagaccccggcgccccaggtgcctgcacgccgcctcttgccaccctga

SEQ ID NO: 414 - DNA, 1999 bp, Homo Sapiens
gccgggagcgccgctccagcgaggcgcgggctgtggggccgccgcgtgcctggccccgctcgcccgtgccggccgctcgcccgccatgcctggcttcgactacaagttcctggagaagcccaagcgacggctgctgtgcccactgtgcgggaagcccatgcgcgagcctgtgcaggtttccacctgcggccaccgtttctgcgatacctgcctgcaggagttcctcagtgaaggagtcttcaagtgccctgaggaccagcttcctctggactatgccaagatctacccagacccggagctggaagtacaagtattgggcctgcctatccgctgcatccacagtgaggagggctgccgctggagtgggccactacgtcatctacagggccacctgaatacctgcagcttcaatgtcattccctgccctaatcgctgccccatgaagctgagccgccgtgatctacctgcacacttgcagcatgactgccccaagcggcgcctcaagtgcgagttttgtggctgtgacttcagtggggaggcctatgagagccatgagggtatgtgcccccaggagagtgtctactgtgagaataagtgtggtgcccgcatgatgcggcggctgctggcccagcatgccacctctgagtgccccaagcgcactcagccctgcacctactgcactaaggagttcgtctttgacaccatccagagccaccagtaccagtgcccaaggctgcctgttgcctgccccaaccaatgtggtgtgggcactgtggctcgggaggacctgccaggccatctgaaggacagctgtaacaccgccctggtgctctgcccattcaaagactccggctgcaagcacaggtgccctaagctggcaatggcacggcatgtggaggagagtgtgaagccacatctggccatgatgtgtgccctggtgagccggcaacggcaggagctgcaggagcttcggcgagagctggaggagctatcagtgggcagtgatggcgtgctcatctggaagattggcagctatggacggcggctacaggaggccaaggccaagcccaaccttgagtgcttcagcccagccttctacacacataagtatggttacaagctgcaggtgtctgcattcctcaatggcaatggcagtggtgagggcacacacctctcactgtacattcgtgtgctgcctggtgcctttgacaatctccttgagtggccctttgcccgccgtgtcaccttctccctgctggatcagagcgaccctgggctggctaaaccacagcacgtcactgagaccttccaccccgacccaaactggaagaatttccagaagccaggcacgtggcggggctccctggatgagagttctctgggctttggttatcccaagttcatctcccaccaggacattcgaaagcgaaactatgtgcgggatgatgcagtcttcatccgtgctgctgttgaactgccccggaagatcctcagctgagtgcaggtggggttcgaggggaaaggacgatggggcatgacctcagtcaggcactggctgaacttggagagggggccggacccccgtcagctgcttctgctgcctaggttctgttaccccatcctccctcccccagccaccaccctcaggtgcctccaattggtgcttcagccctggcccctgtggggaacaggtcttggggtcatgaagggctggaaacaagtgaccccagggcctgtctcccttcttgggtagggcagacatgccttggtgccggtcacactctacacggactgaggtgcctgctcaggtgctatgtcccaagagccataagggggtgggaattggggagggagaaagggtagttcaaagagtctgtcttgagatctgattttttccccctttacctagctgtgccccctctggttatttatttccttagtgccaggagggcacagcaggggagccctgatttttaataaatccggaattgtatttatt

SEQ ID NO: 415 - DNA, 1690 bp, Homo Sapiens
aaagcgcggggcccgcccctgggaccctccgggccgggcggtttggccccttagcgcccgggcgtcggggcggtaaaaggccggcagaagggaggcacttgagaaatgtctttcctccaggacccaagtttcttcaccatggggatgtggtccattggtgcaggagccctgggggctgctgccttggcattgctgcttgccaacacagacgtgtttctgtccaagccccagaaagcggccctggagtacctggaggatatagacctgaaaacactggagaaggaaccaaggactttcaaagcaaaggagctatgggaaaaaaatggagctgtgattatggccgtgcggaggccaggctgtttcctctgtcgagaggaagctgcggatctgtcctccctgaaaagcatgttggaccagctgggcgtccccctctatgcagtggtaaaggagcacatcaggactgaagtgaaggatttccagccttatttcaaaggagaaatcttcctggatgaaaagaaaaagttctatggtccacaaaggcggaagatgatgtttatgggatttatccgtctgggagtgtggtacaacttcttccgagcctggaacggaggcttctctggaaacctggaaggagaaggcttcatccttgggggagttttcgtggtgggatcaggaaagcagggcattcttcttgagcaccgagaaaatgaatttggagacaaagtaaacctactttctgttctggaagctgctaagatgatcaaaccacagactttggcctcagagaaaaaatgattgtgtgaaactgcccagctcagggataaccagggacattcacctgtgttcatgggatgtattgtttccactcgtgtccctaaggagtgagaaacccatttatactctactctcagtatggattattaatgtattttaatattctgtttaggcccactaaggcaaaatagccccaaaacaagactgacaaaaatctgaaaaactaatgaggattattaagctaaaacctgggaaataggaggcttaaaattgactgccaggctgggtgcagtggctcacacctgtaatcccagcactttgggaggccaaggtgagcaagtcacttgaggtcgggagttcgagaccagcctgagcaacatggcgaaaccccgtctctactaaaaatacaaaaatcacccgggtgtggtggcaggcacctgtagtcccagctacccgggaggctgaggcaggagaatcacttgaacctgggaggtggaggttgcggtgagctgagatcacaccactgtattccagcctgggtgactgagactctaactaaaaaaaaaaaaaaaaaaaaaaaattgattgctgtgcctcattacaaatgcatatgatgtttgagtgctgttgtttgaaattatttttcttttcgggtcttcaaaaattcaagaaaagttgatgattgacttgaagattacaaaatttaaggttttttggcatgtgtgttttctattaataattggttatatgatgtcaaagtaatactttcataatagaattgacatgctctgggatagtttgacaaaggtaaattataaagtgagatctcttgtttcattatcttccattctaacctcagagatctgtttctctagaaaaaaagtccatctctggctttaataaaattatgcatcag

SEQ ID NO: 416 - DNA, 923 bp, Homo Sapiens
agtggagtgaggggtaacaagatggcgaccgagacggtggagctccataagctaaagcttgccgaactaaagcaagaatgtcttgctcgtggtttggagaccaagggaataaagcaagatcttatccacagactccaggcatatcttgaagaacatgctgaagaggaggcaaatgaagaagatgtactgggagatgaaacagaggaagaagaaacaaagcccattgagctccctgtcaaagaggaagaaccccctgaaaaaactgttgatgtggcagcagagaagaaagtggtgaaaattacatctgaaataccacagactgagagaatgcagaagagggctgaacgattcaatgtacctgtgagcttggagagtaagaaagctgctcgggcagctaggtttgggatttcttcagttccaacaaaaggtctgtcatctgataacaaacctatggttaacttggataagctgaaggaaagagctcaaagatttggtttgaatgtctcttcaatctccagaaagtctgaagatgatgagaaactgaaaaagaggaaggagcgatttgggattgtcacaagttcagctggaactggaaccacagaggatacagaggcaaagaagaggaaaagagcagagcgctttgggattgcctgatgaagagttcctgatactttctgttctccagtgttttccatttctctccttcttcttggtcacatatatgcctaaatgcacagtcatgtgcctacgtcctgcctcgcaatgagggagcatgtaccccaggtacatccatgaactgcggcagcagtttgacttattgctgtttcagctttaaggttgttgtgtttttgtttttgattatgttgcttgttaataaaaaaaaatagaaaagtaaaaaaaaaaaaaaaaaaaaaaaaaaaaaa

SEQ ID NO: 417 - DNA, 3368 bp, Homo Sapiens
agttgtttgggttgagttcaggagaagcatggccaggtcgagtccgtacctgcgccaacttcagggacctctgctcccacccagggatctggtggaggaggacgacgactacctaaacgacgacgtggaggaggatgaagagtccgtgttcatcgacgccgaggagctctgcagtgggggcgtaaaggctggcagcctccccgggtgcctccgcgtttctatttgtgatgaaaacacacaagagacatgtaaagtgtttggacgttttccgataacaggtgcttggtggagagtgaaggtacaagtaaagcctgtggtgggatcaaggagctatcaatatcaagttcaaggatttccgtcttactttttgcagtctgatatgtcaccaccaaatcaaaaacatatctgtgctctctttcttaaagagtgtgaggtctccagtgatgatgttaataaatttttaacatgggtaaaggaggtatcaaactacaaaaacctaaactttgaaaatcttagggaaacactaagaactttccacaaggaaactggaaggaaagatcaaaagcagcctacacagaatggtcaggaagagttgttcctagacaatgagatgagtcttcctctggaaaacacaattccatttagaaatgtaatgacagctttgcagtttccgaagataatggaattccttccagttcttctgcctcgacactttaaatggatcatagggtcaggttctaaagagatgttgaaagagatagaagagattttaggtacacatccgtggaaacttggatttagtaaaataacctacagagagtggaaactcctgcgatgtgaggcaagttggatagcattttgtcagtgtgagtctcttctccagctgatgactgatttggagaagaatgcattaataatgtattccagactgaagcagatatgtagagaagatgggcacacatatgttgaagtgaatgacttaactttgacattgtcaaatcatatgtcatttcatgctgcttcagagtctctgaagtttttgaaggatattggtgtggtgacatatgagaagtcctgtgtcttcccttatgacctttaccatgctgaaagagccatcgccttttcaatttgtgacctgatgaagaaacctccttggcatttatgtgtcgatgtcgaaaaggtgcttgcctctattcacaccacaaaacctgagaattcaagcgatgatgcattgaatgagagcaaacctgatgaagtaagattagaaaatcctgtggatgttgtggacacacaggacaatggtgaccatatttggactaatggtgaaaatgaaattaatgcagaaataagtgaagttcagctggatcaggatcaggttgaagttccactggatcgggatcaggtggctgctttggaaatgatttgctccaatcctgtgacagtcataagtgggaaaggtggatgtgggaagaccacaatcgttagccgtctttttaagcatatagagcagttggaagaaagagaagtaaaaaaagcctgtgaagattttgaacaagaccagaatgcttcagaagaatggattacctttactgagcaaagtcaactagaggcggacaaggctatagaagttttgctcacagcacctacagggaaagcagctggcttactaagacagaaaactggtcttcatgcctacacactgtgtcaggtcaattatagcttctattcatggactcaaacaatgatgaccacaaacaaaccatggaaattttcttcggttagagttctggttgtggatgaagggagtttggtatctgtaggaatcttcaaatcggtcttaaatttattgtgtgagcactccaaactttctaagcttattatccttggtgacattagacagttacccagtattgaacctggtaacttgctgaaagatctttttgagactcttaagtcaagaaattgtgctattgagctaaagacaaaccatagagcagaatctcagctcattgtggacaatgctacaagaatctcaagacgccaatttccaaaatttgatgcagaactaaatatctctgataatccaacattacccatctcaattcaagataagacatttatttttgtcaggctcccagaagaggatgccagttctcagtcatctaaaactaatcatcactcttgtttatattctgcagttaaaactttactacaagaaaataacttacaaaatgcaaaaacatcacaatttattgcatttagaaggcaagactgtgatctaattaatgactgctgctgcaaacactacacaggccacctcaccaaagaccatcagagtagacttgtttttggaattggtgataaaatttgttgtaccaggaatgcatacctctcagacttactacctgaaaatatctctggaagtcagcaaaataatgatctagatgccagtagtgaagacttttctggtacgcttcctgattttgctaaaaataagcgtgactttgaaagtaacgttcgactgtgcaatggagagatatttttcataacaaatgatgtaactgatgtaacttttggaaagagaagatctttgaccattaataatatggctggcctggaagtaactgtggattttaagaaactaatgaaatattgtcgcataaaacatgcatgggcaagaactattcacacttttcaggggtccgaggagcaaacagttgtctatgtggtggggaaggcgggccgccagcactggcagcatgtctacaccgccgtgaccaggggccgctgccgagtgtatgtgattgcagaggagtctcagctccggaatgccattatgaaaaacagttttcctagaaaaactcgtttgaaacatttcttgcaaagtaagctctcctctagcggcgcacctccagcagattttccgtccccacggaagagctctggagacagtggaggacccagcacaccgtcagcatctccactccctgtagtcacagaccacgccatgacaaatgatgtcacctggagcgaggcctcttcgcctgatgagaggacactcacctttgctgaaagatggcaattatcttcacctgatggagtagatacagatgatgatttaccaaaatcgcgagcatccaaaagaacctgtggtgtgaatgatgatgaaagtccaagcaaaatttttatggtgggagaatctccacaagtgtcttccagacttcagaatttgagactgaataatttaattcccaggcaacttttcaagcccaccgataatcaagaaacttagttttatttcaaattgttccgagtaactatgtttttctattggagacaaaatgaacatcgtaacgtcaaagtaccaa

SEQ ID NO: 418 - DNA, 3784 bp, Homo Sapiens
agatgctgtttggcgactcgtcgccattcccggagcaggtcggcctcggcccaggggcgagtatccgttgctgtgtcggagacactagtccccgacaccgagacagccagccctctcccctgcctcgcggcgggagagcgtgtccggccggccggccggcggggctcgcgcaacctccctcgcctccccttcccccgcagcctccgccccgccaggcccggcccggactcccgagccccggcctcctcgtcctcggtcgccgctgccgccgggcttaacagccccgtccgccgcttctcttcctagtttgagaagccaaggaaggaaacagggaaaaatgtcgccatgaaggccgagaaccgctgccgccgccgacccccgccggccctgaacgccatgagcctgggtccccgccgcgcccgctccgctccgactgccgtcgccgccgaggcccccgttgatgccgctgagctcccccaacgccgccgccaccgcctccgacatggacaagaacagcggctccaacagctcctccgcctcttcgggcagcagcaaagggcaacagccgccccgctccgcctcggcggggccagccggcgagtctaaacccaagagcgatggaaagaactccagtggatccaagcgttataatcgcaaacgtgaactttcctaccccaaaaatgaaagttttaacaaccagtcccgtcgctccagttcacagaaaagcaagacttttaacaagatgcctcctcaaaggggcggcggcagcagcaaactctttagctcttcttttaatggtggaagacgagatgaggtagcagaggctcaacgggcagagtttagccctgcccagttctctggtcctaagaagatcaacctgaaccacttgttgaatttcacttttgaaccccgtggccagacgggtcactttgaaggcagtggacatggtagctggggaaagaggaacaagtggggacataagccttttaacaaggaactctttttacaggccaactgccaatttgtggtgtctgaagaccaagactacacagctcattttgctgatcctgatacattagttaactgggactttgtggaacaagtgcgcatttgtagccatgaagtgccatcttgcccaatatgcctctatccacctactgcagccaagataacccgttgtggacacatcttctgctgggcatgcatcctgcactatctttcactgagtgagaagacgtggagtaaatgtcccatctgttacagttctgtgcataagaaggatctcaagagtgttgttgccacagagtcacatcagtatgttgttggtgataccattacgatgcagctgatgaagagggagaaaggggtgttggtggctttgcccaaatccaaatggatgaatgtagaccatcccattcatctaggagatgaacagcacagccagtactccaagttgctgctggcctctaaggagcaggtgctgcaccgggtagttctggaggagaaagtagcactagagcagcagctggcagaggagaagcacactcccgagtcctgctttattgaggcagctatccaggagctcaagactcgggaagaggctctgtcgggattggccggaagcagaagggaggtcactggtgttgtggctgctctggaacaactggtgctgatggctcccttggcgaaggagtctgtttttcaacccaggaagggtgtgctggagtatctgtctgccttcgatgaagaaaccacggaagtttgttctctggacactccttctagacctcttgctctccctctggtagaagaggaggaagcagtgtctgaaccagagcctgaggggttgccagaggcctgtgatgacttggagttagcagatgacaatcttaaagaggggaccatttgcactgagtccagccagcaggaacccatcaccaagtcaggcttcacacgcctcagcagctctccttgttactacttttaccaagcggaagatggacagcatatgttcctgcaccctgtgaatgtgcgctgcctcgtgcgggagtacggcagcctggagaggagccccgagaagatctcagcaactgtggtggagattgctggctactccatgtctgaggatgttcgacagcgtcacagatatctctctcacttgccactcacctgtgagttcagcatctgtgaactggctttgcaacctcctgtggtctctaaggaaaccctagagatgttctcagatgacattgagaagaggaaacgtcagcgccaaaagaaggctcgggaggaacgccgccgagagcgcaggattgagatagaggagaacaagaaacagggcaagtacccagaagtccacattcccctcgagaatctacagcagtttcctgccttcaattcttatacctgctcctctgattctgctttgggtcccaccagcaccgagggccatggggccctctccatttctcctctcagcagaagtccaggttcccatgcagactttctgctgacccctctgtcacccactgccagtcagggcagtccctcattctgcgttgggagtctggaagaagactctcccttcccttcctttgcccagatgctgagggttggaaaagcaaaagcagatgtgtggcccaaaactgctccaaagaaagatgagaacagcttagttcctcctgcccctgtggacagcgacggggagagtgataattcagaccgtgttcctgtgcccagttttcaaaattccttcagccaagctattgaagcagccttcatgaaactggacacaccagctacttcagatcccctctctgaagagaaaggaggaaagaaaagaaaaaaacagaaacagaagctcctgttcagcacctcagtcgtccacaccaagtgacactactggcccaggctaccttctccatctggtttttgtttttgtttttttttcccccatgcttttgtttggctgctgtaatttttaagtatttgagtttgaacagattagctctggggggagggggtttccacaatgtgagggggaaccaagaaaattttaaatacagtgtattttccagcttcctgtctttacaccaaaataaagtattgacacaagagatctcttcctgccaaggtttttagttcattgccagtttagtctttttgacccatgtgtaattaatttttctcaacccaaagtaagattgagtcccctttgagatgcattagagcagtccaacccagaatggcacacactgctctgctgtagcatcatgtcagggcttcctggactcagtacacctctcagtttgtcttttaaaaaacagctgaatctttactacctatttagttctccttgttaaagaaacaggggtgggaataaaatggatttaggacacccagtttgaattgcagtttttttttttctgacacatggccaggctgtggtgccagcttaatggagtaggctgtccttggcacttgcatgtgtgaaaggagggttttgcctcttcttgagcatggcttgagttggtaaggaaagctgtaactcacgaagccctgagacctgctacccctaagatcgagcttgttttcagtgactggcttgagtcataggaggaggagtctggtacagctgcaggagagcagggccatctgaagcggtagcattgccaccatctccctctcatctagagcagttttcttatgccttggtttgagctgaatttgatgtgaattcttttgctgcttaataaagtgacctctaggtgcattagaatgcgaa

SEQ ID NO: 419 - DNA, 1947 bp, Homo Sapiens
ggggtgtgcaaatagaggaataaatagcagggcagcaactatgtctggaggtcattgtctttcctgtctcagtagtaatcaatcactgcttatcttcaaaaacccagagtaggggatggggcagttagtggggacagagggcagatgggtaagattcagagcacaggctagtgacggaagtttaaacttgtgagttaaatagggtttggcaatctagctggatagcatccctgccccttgaagagatgtttttgtggcgccacactactgacttaggcataatgcctagagatggattagaactgcacaatgaactagtggtgaggttcagtttaatggaaattggtgaaagcttttaggataaaatgataatctttgtttctttcaggaaaatggcagacaatttttcggtaagtgttttatgcctgtttcttccccttgatcagctccacatggttgagggttgggggttttgtttttaccatgactttcccttttcactctcccactgcgtggcttcccctggactcatttgtccaatgagggcttgcaagctggagccttgtttttccagcagcagatttgggaagaaagccaggcagagcgaggcctgggactcactcacagtaaccctttcaccaaaaggcccagggcggaagggagtggactctgccggcaggagctgagaaatcctctgagtagcgggaagtgcggtacagtctgggcattctgatgtttgtgattgtttttctcacggtgatgaaaaagtatgtgctataagtagaggagcgctaactcctgacttgagctaattatgaaaatgcagccctccctgatctgagacgttgggaggcaagaataaagtgaaaaagtatatgtaatcccaacatctaattttagtcttagaaactcaaactattaataagtggaaaaagtttaatgatatgcatgtaatgcctttgccatattcctctccttcttagatcacatattcctattttcctgaaaattctgcttttgagaatgctttctgtcccgtaattgtgtatgtctttctttccagctccatgatgcgttatctgggtctggaaacccaaaccctcaaggatggcctggcgcatgggggaaccagcctgctggggcagggggctacccaggggcttcctatcctggggcctaccccgggcaggcacccccaggggcttatcctggacaggcacctccaggcgcctaccatggagcacctggagcttatcccggagcacctgcacctggagtctacccagggccacccagcggccctggggcctacccatcttctggacagccaagtgcccccggagcctaccctgccactggcccctatggcgcccctgctgggccactgattgtgccttataacctgcctttgcctgggggagtggtgcctcgcatgctgataacaattctgggcacggtgaagcccaatgcaaacagaattgctttagatttccaaagagggaatgatgttgccttccactttaacccacgcttcaatgagaacaacaggagagtcattgtttgcaatacaaagctggataataactggggaagggaagaaagacagtcggttttcccatttgaaagtgggaaaccattcaaaatacaagtactggttgaacctgaccacttcaaggttgcagtgaatgatgctcacttgttgcagtacaatcatcgggttaaaaaactcaatgaaatcagcaaactgggaatttctggtgacatagacctcaccagtgcttcatataccatgatataatctgaaaggggcagattaaaaaaaaaaaaagaatctaaaccttacatgtgtaaaggtttcatgttcactgtgagtgaaaatttttacattcatcaatatccctcttgtaagtcatctactcaataaatattacagtgaaaaaaaaaaaa

SEQ ID NO: 420 - DNA, 3537 bp, Homo Sapiens
gcgagcgcgggcaggcggcgacgcgggggcaggggtggacggcggtcagagccgaacgcgagggcggcgcccggggactggagctgcgcgcaataggacagctggcctgaagctcagagccggggcgtgcgccatggccccacactgggctgtctggctgctggcagcaaggctgtggggcctgggcattggggctgaggtgtggtggaaccttgtgccgcgtaagacagtgtcttctggggagctggccacggtagtacggcggttctcccagaccggcatccaggacttcctgacactgacgctgacggagcccactgggcttctgtacgtgggcgcccgagaggccctgtttgccttcagcatggaggccctggagctgcaaggagcgatctcctgggaggcccccgtggagaagaagactgagtgtatccagaaagggaagaacaaccagaccgagtgcttcaacttcatccgcttcctgcagccctacaatgcctcccacctgtacgtctgtggcacctacgccttccagcccaagtgcacctacgtcaacatgctcaccttcactttggagcatggagagtttgaagatgggaagggcaagtgtccctatgacccagctaagggccatgctggccttcttgtggatggtgagctgtactcggccacactcaacaacttcctgggcacggaacccattatcctgcgtaacatggggccccaccactccatgaagacagagtacctggccttttggctcaacgaacctcactttgtaggctctgcctatgtacctgagagtgtgggcagcttcacgggggacgacgacaaggtctacttcttcttcagggagcgggcagtggagtccgactgctatgccgagcaggtggtggctcgtgtggcccgtgtctgcaagggcgatatggggggcgcacggaccctgcagaggaagtggaccacgttcctgaaggcgcggctggcatgctctgccccgaactggcagctctacttcaaccagctgcaggcgatgcacaccctgcaggacacctcctggcacaacaccaccttctttggggtttttcaagcacagtggggtgacatgtacctgtcggccatctgtgagtaccagttggaagagatccagcgggtgtttgagggcccctataaggagtaccatgaggaagcccagaagtgggaccgctacactgaccctgtacccagccctcggcctggctcgtgcattaacaactggcatcggcgccacggctacaccagctccctggagctacccgacaacatcctcaacttcgtcaagaagcacccgctgatggaggagcaggtggggcctcggtggagccgccccctgctcgtgaagaagggcaccaacttcacccacctggtggccgaccgggttacaggacttgatggagccacctatacagtgctgttcattggcacaggagacggctggctgctcaaggctgtgagcctggggccctgggttcacctgattgaggagctgcagctgtttgaccaggagcccatgagaagcctggtgctatctcagagcaagaagctgctctttgccggctcccgctctcagctggtgcagctgcccgtggccgactgcatgaagtatcgctcctgtgcagactgtgtcctcgcccgggacccctattgcgcctggagcgtcaacaccagccgctgtgtggccgtgggtggccactctggatctctactgatccagcatgtgatgacctcggacacttcaggcatctgcaacctccgtggcagtaagaaagtcaggcccactcccaaaaacatcacggtggtggcgggcacagacctggtgctgccctgccacctctcctccaacttggcccatgcccgctggacctttgggggccgggacctgcctgcggaacagcccgggaccttcctctacgatgcccggctccaggccctggttgtgatggctgcccagccccgccatgccggggcctaccactgcttttcagaggagcagggggcgcggctggctgctgaaggctaccttgtggctgtcgtggcaggcccgtcggtgaccttggaggcccgggcccccctggaaaacctggggctggtgtggctggcggtggtggccctgggggctgtgtgcctggtgctgctgctgctggtgctgtcattgcgccggcggctgcgggaagagctggagaaaggggccaaggctactgagaggaccttggtgtaccccctggagctgcccaaggagcccaccagtccccccttccggccctgtcctgaaccagatgagaaactttgggatcctgtcggttactactattcagatggctcccttaagatagtacctgggcatgcccggtgccagcccggtggggggcccccttcgccacctccaggcatcccaggccagcctctgccttctccaactcggcttcacctggggggtgggcggaactcaaatgccaatggttacgtgcgcttacaactaggaggggaggaccggggagggctcgggcaccccctgcctgagctcgcggatgaactgagacgcaaactgcagcaacgccagccactgcccgactccaaccccgaggagtcatcagtatgaggggaacccccaccgcgtcggcgggaagcgtgggaggtgtagctcctacttttgcacaggcaccagctacctcagggacatggcacgggcacctgctctgtctgggacagatactgcccagcacccacccggccatgaggacctgctctgctcagcacgggcactgccacttggtgtggctcaccagggcaccagcctcgcagaaggcatcttcctcctctctgtgaatcacagacacgcgggaccccagccgccaaaacttttcaaggcagaagtttcaagatgtgtgtttgtctgtatttgcacatgtgtttgtgtgtgtgtgtatgtgtgtgtgcacgcgcgtgcgcgcttgtggcatagccttcctgtttctgtcaagtcttcccttggcctgggtcctcctggtgagtcattggagctatgaaggggaaggggtcgtatcactttgtctctcctacccccactgccccgagtgtcgggcagcgatgtacatatggaggtggggtggacagggtgctgtgccccttcagagggagtgcagggcttggggtgggcctagtcctgctcctagggctgtgaatgttttcagggtggggggagggagatggagcctcctgtgtgtttggggggaagggtgggtggggcctcccacttggccccggggttcagtggtattttatacttgccttcttcctgtacagggctgggaaaggctgtgtgaggggagagaagggagagggtgggcctgctgtggacaatggcatactctcttccagccctaggaggagggctcctaacagtgtaacttattgtgtccccgcgtatttatttgttgtaaatatttgagtatttttatattgacaaataaaatggagaaaatgaaaaaaaaaaaaaaaaaa

SEQ ID NO: 421 - DNA, 1571 bp, Homo Sapiens
ctgcaccaagctggccctgcacggctgcaagggaggctcctgtggacaggccaggcaggtgggcctcaggaggtgcctccaggcggccagtgggcctgaggccccagcaagggctagggtccatctccagtcccaggacacagcagcggccaccatggccacgcctgggctccagcagcatcagcccccaggaccggggaggcacaggtggcccccaccacccggaggagcagctcctgcccctgtccgggggatgactgattctcctccgccaggccacccagaggagaaggccaccccgcctggaggcacaggccatgaggggctctcaggaggtgctgctgatgtggcttctggtgttggcagtgggcggcacagagcacgcctaccggcccggccgtagggtgtgtgctgtccgggctcacggggaccctgtctccgagtcgttcgtgcagcgtgtgtaccagcccttcctcaccacctgcgacgggcaccgggcctgcagcacctaccgaaccatctataggaccgcctaccgccgcagccctgggctggcccctgccaggcctcgctacgcgtgctgccccggctggaagaggaccagcgggcttcctggggcctgtggagcagcaatatgccagccgccatgccggaacggagggagctgtgtccagcctggccgctgccgctgccctgcaggatggcggggtgacacttgccagtcagatgtggatgaatgcagtgctaggaggggcggctgtccccagcgctgcgtcaacaccgccggcagttactggtgccagtgttgggaggggcacagcctgtctgcagacggtacactctgtgtgcccaagggagggccccccagggtggcccccaacccgacaggagtggacagtgcaatgaaggaagaagtgcagaggctgcagtccagggtggacctgctggaggagaagctgcagctggtgctggccccactgcacagcctggcctcgcaggcactggagcatgggctcccggaccccggcagcctcctggtgcactccttccagcagctcggccgcatcgactccctgagcgagcagatttccttcctggaggagcagctggggtcctgctcctgcaagaaagactcgtgactgcccagcgccccaggctggactgagcccctcacgccgccctgcagcccccatgcccctgcccaacatgctgggggtccagaagccacctcggggtgactgagcggaaggccaggcagggccttcctcctcttcctcctccccttcctcgggaggctccccagaccctggcatgggatgggctgggatcttctctgtgaatccacccctggctacccccaccctggctaccccaacggcatcccaaggccaggtgggccctcagctgagggaaggtacgagctccctgctggagcctgggacccatggcacaggccaggcagcccggaggctgggtggggcctcagtgggggctgctgcctgacccccagcacaataaaaatgaaacgtgaaaaaaaaaaaaaaaaaaaaaaaaaaaaaaaaaaaaaaaaa

SEQ ID NO: 422 - DNA, 1760 bp, Homo Sapiens
ggcgaatggctcgtctgtagtgcacgccgcgggcccagctgcgaccccggccccgcccccgggaccccggccatggacgaactgttccccctcatcttcccggcagagccagcccaggcctctggcccctatgtggagatcattgagcagcccaagcagcggggcatgcgcttccgctacaagtgcgaggggcgctccgcgggcagcatcccaggcgagaggagcacagataccaccaagacccaccccaccatcaagatcaatggctacacaggaccagggacagtgcgcatctccctggtcaccaaggaccctcctcaccggcctcacccccacgagcttgtaggaaaggactgccgggatggcttctatgaggctgagctctgcccggaccgctgcatccacagtttccagaacctgggaatccagtgtgtgaagaagcgggacctggagcaggctatcagtcagcgcatccagaccaacaacaaccccttccaagttcctatagaagagcagcgtggggactacgacctgaatgctgtgcggctctgcttccaggtgacagtgcgggacccatcaggcaggcccctccgcctgccgcctgtccttcctcatcccatctttgacaatcgtgcccccaacactgccgagctcaagatctgccgagtgaaccgaaactctggcagctgcctcggtggggatgagatcttcctactgtgtgacaaggtgcagaaagaggacattgaggtgtatttcacgggaccaggctgggaggcccgaggctccttttcgcaagctgatgtgcaccgacaagtggccattgtgttccggacccctccctacgcagaccccagcctgcaggctcctgtgcgtgtctccatgcagctgcggcggccttccgaccgggagctcagtgagcccatggaattccagtacctgccagatacagacgatcgtcaccggattgaggagaaacgtaaaaggacatatgagaccttcaagagcatcatgaagaagagtcctttcagcggacccaccgacccccggcctccacctcgacgcattgctgtgccttcccgcagctcagcttctgtccccaagccagcaccccagccctatccctttacgtcatccctgagcaccatcaactatgatgagtttcccaccatggtgtttccttctgggcagatcagccaggcctcggccttggccccggcccctccccaagtcctgccccaggctccagcccctgcccctgctccagccatggtatcagctctggcccaggccccagcccctgtcccagtcctagccccaggccctcctcaggctgtggccccacctgcccccaagcccacccaggctggggaaggaacgctgtcagaggccctgctgcagctgcagtttgatgatgaagacctgggggccttgcttggcaacagcacagacccagctgtgttcacagacctggcatccgtcgacaactccgagtttcagcagctgctgaaccagggcatacctgtggccccccacacaactgagcccatgctgatggagtaccctgaggctataactcgcctagtgacaggggcccagaggccccccgacccagctcctgctccactgggggccccggggctccccaatggcctcctttcaggagatgaagacttctcctccattgcggacatggacttctcagccctgctgagtcagatcagctcctaagggggtgacgcctgccctccccagagcactgg

SEQ ID NO: 423 - DNA, 2420 bp, Homo Sapiens
tcgggcgcgggcgcggggcgcggggctgggcccgggcggagcggcggctgctccggacatgtcgggccctcgcgccggcttctaccggcaggagctgaacaagaccgtgtgggaggtgccgcagcggctgcaggggctgcgcccggtgggctccggcgcctacggctccgtctgttcggcctacgacgcccggctgcgccagaaggtggcggtgaagaagctgtcgcgccccttccagtcgctgatccacgcgcgcagaacgtaccgggagctgcggctgctcaagcacctgaagcacgagaacgtcatcgggcttctggacgtcttcacgccggccacgtccatcgaggacttcagcgaagtgtacttggtgaccaccctgatgggcgccgacctgaacaacatcgtcaagtgccaggcgctgagcgacgagcacgttcaattcctggtttaccagctgctgcgcgggctgaagtacatccactcggccgggatcatccaccgggacctgaagcccagcaacgtggctgtgaacgaggactgtgagctcaggatcctggatttcgggctggcgcgccaggcggacgaggagatgaccggctatgtggccacgcgctggtaccgggcacctgagatcatgctcaactggatgcattacaaccaaacagtggatatctggtccgtgggctgcatcatggctgagctgctccagggcaaggccctcttcccgggaagcgactacattgaccagctgaagcgcatcatggaagtggtgggcacacccagccctgaggttctggcaaaaatctcctcagaacacgcccggacatatatccagtccctgccccccatgccccagaaggacctgagcagcatcttccgtggagccaaccccctggccatagacctccttggaaggatgctggtgctggacagtgaccagagggtcagtgcagctgaggcactggcccacgcctacttcagccagtaccacgaccccgaggatgagccagaggccgagccatatgatgagagcgttgaggccaaggagcgcacgctggaggagtggaaggagctcacttaccaggaagtcctcagcttcaagcccccagagccaccgaagccacctggcagcctggagattgagcagtgaggtgctgcccagcagcccctgagagcctgtggaggggcttgggcctgcacccttccacagctggcctggtttcctcgagaggcacctcccacactcctatggtcacagacttctggcctaggacccctcgccttcaggagaatctacacgcatgtatgcatgcacaaacatgtgtgtacatgtgcttgccatgtgtaggagtctgggcacaagtgtccctgggcctaccttggtcctcctgtcctcttctggctactgcactctccactgggacctgactgtggggtcctagatgccaaaggggttcccctgcggagttcccctgtctgtcccaggccgacccaagggagtgtcagccttgggctctcttctgtcccagggctttctggaggacgcgctggggccgggaccccgggagactcaaagggagaggtctcagtggttagagctgctcagcctggaggtagggggctgtcttggtcactgctgagacccacaggtctaagaggagaggcagagccagtgtgccaccaggctgggcagggacaaccaccaggtgtcaaatgagaaaagctgcctggagtcttgtgttcacccgtgggtgtgtgtgggcacgtgtggatgagcgtgcactccccgtgttcatatgtcagggcacatgtgatgtggtgcgtgtgaatctgtgggcgcccaaggccagcagccatatctggcaagaagctggagccggggtgggtgtgctgttgccttccctctcctcggttcctgatgccttgaggggtgtttcagactggcggctccagtgggccaaagggcaaccacatgagcatgggcaggggctttctccttggatgtgggacccacagcagcttcctgaggctgggggtgggtgggtgggtggtttggccttgaggacgctagggcaggcagcacacctggatgtggacttggactcggacacttctgccctgcaccctggcccgctctctacctctgcccaccgttgtggccctgcagccggagatctgaggtgctctggtctgtgggtcagtcctctttccttgtcccaggatggagctgatccagtaacctcggagacgggaccctgcccagagctgagttgggggtgtggctctgccctggaaagggggtgacctcttgcctcgaggggcccagggaagcctgggtgtcaagtgcctgcaccaggggtgcacaataaagggggttctctctcaaaaaaaaaaaaaaaaaaaaaaaaaaaaaaaaa

SEQ ID NO: 424 - DNA, 3288 bp, Homo Sapiens
ctggctgcccgcacctgcacccgcgcgtcggcggcgccgaagccccgctccccgcctgcgcgtctgtctcgtccgcatctccgcggcctcctgctccacgacgtgaccatggccgggctgcaggagctgcgattccctgaggagaagccgctgctccggggccaggacgccaccgagctggagagctccgatgccttcctcttggctgcagacacagactggaaggaacatgacatcgagacaccctacggccttctgcatgtagtgatccggggctcccccaaggggaaccgcccagccatcctcacctaccatgatgtgggcctcaaccacaaactatgcttcaacaccttcttcaacttcgaggacatgcaggagatcaccaagcactttgtggtgtgtcacgtggatgcccctggacaacaggtgggggcgtcgcagtttcctcaggggtaccagttcccctccatggagcagctggctgccatgctccccagcgtggtgcagcatttcgggttcaagtatgtgattggcatcggagtgggcgccggagcctatgtgctggccaagtttgcactcatcttccccgacctggtggaggggctggtgctggtgaacatcgaccccaatggcaaaggctggatagactgggctgccaccaagctctccggcctaactagcactttacccgacacggtgctctcccacctcttcagccaggaggagctggtgaacaacacagagttggtgcagagctaccggcagcagattgggaacgtggtgaaccaggccaacctgcagctcttctggaacatgtacaacagccgcagagacctggacattaaccggcctggaacggtgcccaatgccaagacgctccgctgccccgtgatgctggtggttggggataatgcacccgctgaggacggggtggtggagtgcaactccaaactggacccgaccactacgaccttcctgaagatggcagactctggagggctgccccaggtcacacagccagggaagctgactgaagccttcaaatacttcctgcaaggcatgggctacatgccctcagccagcatgacccgcctggcacgctcccgcactgcatccctcaccagtgccagctcggtggatggcagccgcccacaggcctgcacccactcagagagcagcgaggggctgggccaggtcaaccacaccatggaggtgtcctgttgaagcccttgatcccgctgacgacgcccacgtcgaggccccaccgccatccttgcgccggctcatgttccctttagtttatttttgtgagggcaaaggggaggaaatggggttctgtttgaaaaaaatgaggggatcttagatgctgcagcagaacagtctccaggtgttttaaggggctcagtcctcctcatcccatctcactctccgtggtaacttagccaacttgacccctctcatcccactcccggcggcccaggcacagaagggcagggccatagggagggagattcgctacggatccaggccattcctgggtgagcccttgggcaggcatgtttggagatgagagaggcttcgagagggtgggtgctgggccacaggggtgcggggccagctcaggcactggcgtgggagccctgggagaccccttcccccaccctccaccaagcacacctgtttctgtctcatagcacatgtgacaatcatctggacaacagccacaagggggcgctcggaccaggcagccactttcctggtgctctctgggcccagctggtgctgtagggccacgcaggcaggggcgtcaaggggtttctctgcccaaggaagacagaacatggagaaccgtcagggcaggaaccccacagactgtcccttccagcccacactctgccacctcctggccctgtcccaattctgagccaaggcctccccgaggcagaagttgcctggtcctctgtccccacagtgacctgactgggggtgagggagaaggaggagagagcccatgtgtggtgtgtgtgcccctgagaacttcgtggtgactgcctttgggagcccgcaggtggccagaggcaggggtagctgagttcctggagaccccttttttgcccccaggttccccagagggcaacgccatcagtagcagtgtggtgtttcaggcagagctctggccaggctgtgccagtgtgtcccggacgcatcactaaggaagagagagtttatttagtcaactggcccaaggcagcgaggcttctacagtcccacaccccatagccgcctgggctggggcttactgggggctgaaggttctggacatgaacaagggtcaggtagaagagaaaggcttcccctacaccccagcctcctgctgtcccctgaagcccaggactgcgttgtatgctttccatccactcaccttaccccatagcatcttgcggcccagaaaccagagccatttgtctcagaccctaaatcaataatcacaaaccccaaaacgggagagagcagtgaaaacatgcagggctgtggacgggggaagggttgtggcgggtgttctgaggctgagaggacacctatatgcgtatttcctctacacacatcaccccccttctataatcttaagccatgactagcctggtggcgtgttagtttctgcccagttctaccccctcatgtgcttcttctgaatactgaatgtgactgtttgaaagctggtagaattcatccctcttactgtagataacactgcaaatcttggaattttgttttttgctgtttccagatgtatctataaatatctatacattatatgtgtgtgtgtgtgtgtgtgtgtgtgtgtacatcgggtcctcccatgtgtggtgttcttctggaggttgtctctttggtcaaggtgaacttttaatgtttattattttcttctccgcacaaagtaaagagcctaattttgtgtattctggtggctgctgtcatgagatgataaaatgtaaaacaaaactctagtcaacgtagaaagagttaactgtgctgaaaaactaataaagaacctaagaagaattccagtgtggtgatgccatgcccatcatgggaggcttttggagaaacagaatgtttgggcaggggctgctggtgctgcttgggttttgggttgagggtgctaggagaggatggtctccacccatctttctatttccagtacacgtcacattattttaccggtgagatgagaatgtcacaaacattaaaagccttatgtgctcaaaaaaaaaaaaaaaaaaaaaa

SEQ ID NO: 425 - DNA, 2074 bp, Homo Sapiens
acttccggggtccgtcccggttcccggccgttgccacgacgacgaagctgccggccaatggctggcggatgggcccaaggttcccggcgtgcagcgcggctgcctgagggcggcaggctcatggcgccggcgtcgcggttgctcgcgctctgggcgctggcggctgtggctctacccggctccggggcggagggcgacggcgggtggcgcccgggcgggccgggggccgtggcggaggaggagcgctgcacggtggagcgtcgggccgacctcacctacgcggagttcgtgcagcagtacgccttcgtcaggcccgtcatcctgcagggactcacggacaactcgaggttccgggccctgtgctcccgcgacaggttgctggcttcgtttggggacagagtggtccggctgagcaccgccaacacctactcctaccacaaagtggacttgcccttccaggagtatgtggagcagctgctgcacccccaggaccccacctccctgggcaatgacaccctgtacttcttcggggacaacaacttcaccgagtgggcctctctctttcggcactactccccacccccatttggcctgctgggaaccgctccagcttacagctttggaatcgcaggagctggctcgggggtgcccttccactggcatggacccgggtactcagaagtgatctacggtcgtaagcgctggttcctttacccacctgagaagacgccagagttccaccccaacaagaccacgctggcctggctccgggacacatacccagccctgccaccgtctgcacggcccctggagtgtaccatccgggctggtgaggtgctgtacttccccgaccgctggtggcatgctacgctcaaccttgacaccagcgtcttcatctccaccttcctcggctagccaaaacagctggcaggactgccggtcacacaccagcacgtcccacctcgtgctcacggattttattacacagatagtggcggcaatggcctcagcccagcccaccctcacctgcttttccagcccacaaagggggacgatcacggcccagcaaaagcgatgctgagaggggaaacagtccagagtccaacagcagaacttgggggaagcggtcggggtggccaggaacataaactatgtataggggccgggggcttctgcccagggctcccctggaccaggacgccaggtagggcagggaacctcagtagtcctccacccagccattctcagagatgaatgcgtcaataacctccttcatagccaagttggggatgagctgttcctgggtcagggggctccgggtcacggggtcaaaatgacccacacgctgcagtgacaagaagggcagagggcagtcatggggcccaggaccatgccactggccctgctcccccagccgcaggcctcacctgcaggtgctcctcgatgtccttgcggtcgtaggtgatgccactgggcgtgatgcacggctcccgcatcagctcaaagctgatcttgccacacaggtagtcggggatgtctcgcttctgtggcacaggggcacacggtcagaggctgaaaaggggcactgcacgagcacctgccagccatcggcagcaagcgacacacactcaccttcctcttctcatccacctgagaaaaaagctcgtccatgtccgccatgtacttgtcctgtgaagagttgagtgctgtgcttgggggagacaccccacctccctcctccatggggcacagacccaacacaaggcggggatgctcccacgccacgtgcacacacacagacccacatgtgggtggggggcaccctcacgtgcttggcctcaatgcaggcctgctgggcccggacgtggctgtcgtcctcatcaccctcgtggtttcgctggcactcttccagctccctgggggttgaccaggagccggtcagagatggacctggccagatgtctgaccacaccccaatctcagagctaacatccacacttccccacatttcctgcttgccagtaaagccttcgataaacgctaaaaaaaaaaaaaaaaaaaaaaaaaaaaaaaa

SEQ ID NO: 426 - DNA, 532 bp, Homo Sapiens
ctctttccctgccgccgccgagtcgcgcggaggcggaggcttgggtgcgttcaagattcaacttcacccgtaacccaccgccatggccgaggaaggcattgctgctggaggtgtaatggacgttaatactgctttacaagaggttctgaagactgccctcatccacgatggcctagcacgtggaattcgcgaagctgccaaagccttagacaagcgccaagcccatctttgtgtgcttgcatccaactgtgatgagcctatgtatgtcaagttggtggaggccctttgtgctgaacaccaaatcaacctaattaaggttgatgacaacaagaaactaggagaatgggtaggcctttgtaaaattgacagagaggggaaaccccgtaaagtggttggttgcagttgtgtagtagttaaggactatggcaaggagtctcaggccaaggatgtcattgaagagtatttcaaatgcaagaaatgaagaaataaatctttggctcacaaaaaaaaaaaaaaaaaaaaaaaaaaaaaa

SEQ ID NO: 427 - DNA, 1954 bp, Homo Sapiens
gtcaggcggggatacagcctggaaggtaatgcatgtccatggtacacaaattcacaagtttggagaccctgacacacccaccttctcacctgggctctgcgtatcccccagccttgagggaagatgaagcctaaactgatgtaccaggagctgaaggtgcctgcagaggagcccgccaatgagctgcccatgaatgagattgaggcgtggaaggctgcggaaaagaaagcccgctgggtcctgctggtcctcattctggcggttgtgggcttcggagccctgatgactcagctgtttctatgggaatacggcgacttgcatctctttgggcccaaccagcgcccagccccctgctatgacccttgcgaagcagtgctggtggaaagcattcctgagggcctggacttccccaatgcctccacggggaacccttccaccagccaggcctggctgggcctgctcgccggtgcgcacagcagcctggacatcgcctccttctactggaccctcaccaacaatgacacccacacgcaggagccctctgcccagcagggtgaggaggtcctccggcagctgcagaccctggcaccaaagggcgtgaacgtccgcatcgctgtgagcaagcccagcgggccccagccacaggcggacctgcaggctctgctgcagagcggtgcccaggtccgcatggtggacatgcagaagctgacccatggcgtcctgcataccaagttctgggtggtggaccagacccacttctacctgggcagtgccaacatggactggcgttcactgacccaggtcaaggagctgggcgtggtcatgtacaactgcagctgcctggctcgagacctgaccaagatctttgaggcctactggttcctgggccaggcaggcagctccatcccatcaacttggccccggttctatgacacccgctacaaccaagagacaccaatggagatctgcctcaatggaacccctgctctggcctacctggcgagtgcgcccccacccctgtgtccaagtggccgcactccagacctgaaggctctactcaacgtggtggacaatgcccggagtttcatctacgtcgctgtcatgaactacctgcccactctggagttctcccaccctcacaggttctggcctgccattgacgatgggctgcggcgggccacctacgagcgtggcgtcaaggtgcgcctgctcatcagctgctggggacactcggagccatccatgcgggccttcctgctctctctggctgccctgcgtgacaaccatacccactctgacatccaggtgaaactctttgtggtccccgcggatgaggcccaggctcgaatcccatatgcccgtgtcaaccacaacaagtacatggtgactgaacgcgccacctacatcggaacctccaactggtctggcaactacttcacggagacggcgggcacctcgctgctggtgacgcagaatgggaggggcggcctgcggagccagctggaggccattttcctgagggactgggactccccttacagccatgaccttgacacctcagctgacagcgtgggcaacgcctgccgcctgctctgaggcccgatccagtgggcaggccaaggcctgctgggcccccgcggacccaggtgctctgggtcacggcccctgtccccgcacccccgcttctgtctgccccattgtggctcctcaggctctctcccctgctctcccacctctacctccacccccaccggcctgacgctgtggccccgggacccagcagagctgggggagggatcagcccccaaagaaatgggggtgcatgctgggcctggccccctggcccacccccactttccagggcaaaaagggcccagggttataataagtaaataacttgtctgtaaaaaaaaaaaaaaaaaaaaaaaaaaaaaaaaaaaaaaaaaaaaaaaaa

SEQ ID NO: 428 - DNA, 1303 bp, Homo Sapiens
ggcttctgggagcgaccgctccgctcgtctcgttggttccggaggtcgctgcggcggtgggaaatgctggcgcgcgcggcgcggggcactggggcccttttgctgaggggctctctactggcttctggccgcgctccgcgccgcgcctcctctggattgccccgaaacaccgtggtactgttcgtgccgcagcaggaggcctgggtggtggagcgaatgggccgattccaccggatcctggagcctggtttgaacatcctcatccctgtgttagaccggatccgatatgtgcagagtctcaaggaaattgtcatcaacgtgcctgagcagtcggctgtgactctcgacaatgtaactctgcaaatcgatggagtcctttacctgcgcatcatggacccttacaaggcaagctacggtgtggaggaccctgagtatgccgtcacccagctagctcaaacaaccatgagatcagagctcggcaaactctctctggacaaagtcttccgggaacgggagtccctgaatgccagcattgtggatgccatcaaccaagctgctgactgctggggtatccgctgcctccgttatgagatcaaggatatccatgtgccaccccgggtgaaagagtctatgcagatgcaggtggaggcagagcggcggaaacgggccacagttctagagtctgaggggacccgagagtcggccatcaatgtggcagaagggaagaaacaggcccagatcctggcctccgaagcagaaaaggctgaacagataaatcaggcagcaggagaggccagtgcagttctggcgaaggccaaggctaaagctgaagctattcgaatcctggctgcagctctgacacaacataatggagatgcagcagcttcactgactgtggccgagcagtatgtcagcgcgttctccaaactggccaaggactccaacactatcctactgccctccaaccctggcgatgtcaccagcatggtggctcaggccatgggtgtatatggagccctcaccaaagccccagtgccagggactccagactcactctccagtgggagcagcagagatgtccagggtacagatgcaagtcttgatgaggaacttgatcgagtcaagatgagttagtggagctgggcttggccagggagtctggggacaaggaagcagattttcctgattctggctctagcttccctgccaagattttggtttttatttttttatttgaactttagtcgtgtaataaactcaccagtggcaaacctgaaaaaaaaaaaaaaaaaaaaaaaaaaaa

SEQ ID NO: 429 - DNA, 3525 bp, Homo Sapiens
ggagcgggcggcggcggcggcggcgcggaggggccgctcaccccgcagcccggcctcggcctccgccgcttgtcgtcgcgccccgcccgcgagcccgccccgcacgtcccccgccggcggccaccatgagcacaggcctgcggtacaagagcaagctggcgaccccagaggacaagcaggacattgacaagcagtacgtgggcttcgccacactgcccaaccaggtgcaccgcaagtcggtgaagaaaggctttgacttcacactcatggtggctggtgagtcaggcctggggaagtccacactggtccacagcctcttcctgacagacttgtacaaggaccggaagctgctcagtgctgaggagcgcatcagccagacggtagagattctaaaacacacggtggacattgaggagaagggagtcaagctgaagctcaccatcgtggacacgccgggattcggggacgctgtcaacaacaccgagtgctggaagcccatcaccgactatgtggaccagcagtttgagcagtacttccgtgatgagagcggcctcaaccgaaagaacatccaagacaaccgagtgcactgctgcctatacttcatctcccccttcgggcatgggctgcggccagtggatgtgggtttcatgaaggcattgcatgagaaggtcaacatcgtgcctctcatcgccaaagctgactgtcttgtccccagtgagatccggaagctgaaggagcggatccgggaggagattgacaagtttgggatccatgtataccagttccctgagtgtgactcggacgaggatgaggacttcaagcagcaggaccgggaactgaaggagagcgcgcccttcgccgttataggcagcaacacggtggtggaggccaaggggcagcgggtccggggccgactgtacccctgggggatcgtggaggtggagaaccaggcgcattgcgacttcgtgaagctgcgcaacatgctcatccgcacgcatatgcacgacctcaaggacgtgacgtgcgacgtgcactacgagaactaccgcgcgcactgcatccagcagatgaccagcaaactgacccaggacagccgcatggagagccccatcccgatcctgccgctgcccaccccggacgccgagactgagaagcttatcaggatgaaggatgaggaactgaggcgcatgcaggagatgctgcagaggatgaagcagcagatgcaggaccagtgacgctcgccgcggacacaccgtccgtctccgggacgccctcgcacccctggacaccagaccggactgttcccgacccggagacgcggggccacagcccccagctgaccctaatttattctcagcaccaccccctcccaggtcattgtgtctgtttccgaggggcctggaccgtagcccccgcccagctggccctctctgaccttgggggatcaggagcgaagttgggcgggacttcagagatccgcctcccttgcccttcccccgcccccggacggtcacagcacccaaaccgcaggccctgctctggcaggcaggcaaagctaggcagaagaggattcccaggatcctgggtctgttccctgccccagtgctgcagaacggacttgggagccctcctttgcctgctcccgcgggtcacccagcgagtgctgagaccccattttctgtcgaggcgggccgagtcttcccttatccccagacgcctagcgggcagggttgggctgaatcaaatgggagccctccagacataaggaggccagaggctgcaaggagcggggtcgtgaccgcttacaccccttctccacagcccggcccgacctggagggcccccggggcactgggcggtgagccacctcctggcaactctcggtgccgtcccctgccctcgctcgaggcctcttctccccagcaccgctgtggtgtgccgggatcctgagcctaggcctcccgatgttcccacccgcatgatcccttcccgccacacgatgctccgttttcttccgttgtgaatgccgcgtcctgtcctggtgacaggagaacaatgttggtgaacgtcgcagcgggtgtccgagtgctccgtgtgcccctgagagcgggtgggagcggaagcctgagcggcctgcggcctccggcgatagtgtgctatctgccgctgcagcgcgcgtccgcgcggcctctgggctatttctggccaggccgcagcactgtggtcggtgcgggcgtggcaggggcggggcggccttatcgctcggctctcccgcctacgcctcccgctgcagagtaagccgggctgccgtcttctcgccatgggctccggtgagtctggagtccggtcgggcccccggctgctccctaggccgacccgggttgagaggagctctggtcgtttggctgcagctgggagagacttgggtcagacttagaggggacttccagccggcgtgcggggtggtcagggtggagaggctggcgggctaccgggacgccgggcatcaggggctggatggagccgggccggcagtctgggtactcagagatgtcgcccaggtgcccgccgaccgctcggcttactgcggcgcttcccttgcagggccgcgcggggcgctgagcttactgctcctgctgctggccccgccgagccgcccggccgcaggttgcccggcgccctgtagctgcgcggggacgctcgtggactgcgggcgccgcgggctgacttgggcctcgctgccgaccgccttccctgtcgacacaaccgagctggtgctgaccggcaacaacctgacggcgctgccgccggggctgctggacgcgctgcccgcgctgcgcaccgcacacctgggcgccaacccctggcgctgcgactgccgccttgtgccgctgcgcgcctggctggccggccgccccgagcgtgcgccctaccgcgacctgcgttgcgtggcgcccccagcgctgcgcggccgcctgctgccctatctggccgaggacgagctgcgcgccgcttgcgctcccggcccgctctgctggggggcgctggcggcgcagcttgcgctgctgggccttgggctgctgcacgcgttgctgctggtgctgctgctgtgccgcctgcggaggctgcgggcccgggcccgcgctcgcgccgcagcccggctgtcgctgaccgacccgctggtggccgagcgagccggaaccgacgagtcctgaggagagaaccggtgcgtcctgaggagagaaccggcgctgggcaacacgggcctgcaaactcgacaggaccctgcccgaggggccctcgcgccaacctggaccggtccccgcctcctccgctgcccaatctctcagacccaccccacctgcaggcccagaccacgtgggacagaactcctgcccaccctaccccgagggaggcgaacccgcacttccaggcttgggaggaccatggggcacaatgcggtccagaccctgctgcgtctcccttccaaactctggtgctgaataaacccttctgatctggtct

SEQ ID NO: 430 - DNA, 1736 bp, Homo Sapiens
cgaccctcagcagccagcccggcccgcccgcgcccgtccgcagccgcccgccagacgcgcccagtatgagggagatcgtgcacatccaggccggccagtgcggcaaccagatcggggccaagttctgggaagtcatcagtgatgagcatggcatcgaccccagcggcaactacgtgggcgactcggacttgcagctggagcggatcagcgtctactacaacgaggcctcttctcacaagtacgtgcctcgagccattctggtggacctggaacccggaaccatggacagtgtccgctcaggggcctttggacatctcttcaggcctgacaatttcatctttggtcagagtggggccggcaacaactgggccaagggtcactacacggagggggcggagctggtggattcggtcctggatgtggtgcggaaggagtgtgaaaactgcgactgcctgcagggcttccagctgacccactcgctggggggcggcacgggctccggcatgggcacgttgctcatcagcaaggtgcgtgaggagtatcccgaccgcatcatgaacaccttcagcgtcgtgccctcacccaaggtgtcagacacggtggtggagccctacaacgccacgctgtccatccaccagctggtggagaacacggatgagacctactgcatcgacaacgaggcgctctacgacatctgcttccgcaccctcaagctggccacgcccacctacggggacctcaaccacctggtatcggccaccatgagcggagtcaccacctccttgcgcttcccgggccagctcaacgctgacctgcgcaagctggccgtcaacatggtgcccttcccgcgcctgcacttcttcatgcccggcttcgcccccctcacagcccggggcagccagcagtaccgggccctgaccgtgcccgagctcacccagcagatgttcgatgccaagaacatgatggccgcctgcgacccgcgccacggccgctacctgacggtggccaccgtgttccggggccgcatgtccatgaaggaggtggacgagcagatgctggccatccagagcaagaacagcagctacttcgtggagtggatccccaacaacgtgaaggtggccgtgtgtgacatcccgccccgcggcctcaagatgtcctccaccttcatcgggaacagcacggccatccaggagctgttcaagcgcatctccgagcagttcacggccatgttccggcgcaaggccttcctgcactggtacacgggcgagggcatggacgagatggagttcaccgaggccgagagcaacatgaacgacctggtgtccgagtaccagcagtaccaggacgccacggccgaggaagagggcgagatgtacgaagacgacgaggaggagtcggaggcccagggccccaagtgaagctgctcgcagctggagtgagaggcaggtggcggccggggccgaagccagcagtgtctaaacccccggagccatcttgctgccgacaccctgctttcccctcgccctagggctcccttgccgccctcctgcagtatttatggcctcgtcctccccacctaggccacgtgtgagctgctcctgtctctgtcttattgcagctccaggcctgacgttttacggttttgttttttactggtttgtgtttatattttcggggatacttaataaatctattgctgtcagatacccttaaaaaaaaaaaaaaaaaaaaaaaaa

SEQ ID NO: 431 - DNA, 1136 bp, Homo Sapiens
agtcccggaactgctagaacgaaccattcgcatatggagggggtgacccaccatctcagaacattaaaaaagggaaagaatcccctggtgaactacagtgaaagtcttattgagcatttaaatggaaataaaaatattcagtggacctaatgaagagtagatgactttcccttctgtcccctccccgacaggcactcatggtaccggcgccggcgcagctgtgactgtcgctgcagacggaaactgactggggtcaattcaagtcatgcaggctgtgagaaacgcggggtcgcggttcctgcggtcctggacttggccccagacagccggcagggtcgtggccagaacgccggccgggaccatctgcacaggcgctcgacagctccaagacgctgcggccaagcagaaagttgaacagaacgcggctcccagccacaccaagttcagcatttaccctcccattccaggagaggagagctctctgaggtgggcaggaaagaaatttgaggagatcccaattgcacacattaaagcatcccacaacaacacacagatccaggtagtctctgctagtaatgagccccttgcctttgcttcctgtggcacagagggatttcggaatgccaagaagggcacaggcatcgcagcacagacagcaggcatagccgcagcggcgagagctaaacaaaagggcgtgatccacatccgagttgtggtgaaaggcctggggccaggacgcttgtctgccatgcacggactgatcatgggcggcctggaagtgatctcaatcacagacaacaccccaatcccacacaacggctgccgccccaggaaggctcggaagctgtgatgggaaggaggcctgcacttggacctgacctcaagcctcagctccagtgggaccttgtaaaatgctccctgtcagagctctccagaatatgcttgttggagatccttcaggcagtaagggagagttttgcctccttacacagtggcctttgcttgcacctccagctggagatgggtgtgccccagaagtaagctttgcatctcttacaagaggggagctacaggggcagccgtggcctaggcccaaactctgctctgagaaaataaatatctgtaccacctgtcaa

SEQ ID NO: 432 - DNA, 1012 bp, Homo Sapiens
aggcggagctgggtgcgagcgccctaccgctttcgctttcccttcgcggtgcccactccactccttgtgcggcgctaggccccccgtcccggtcatggccatgctcagggtccagcccgaggcccaagccaaggtggatgtgtttcgtgaagacctctgtaccaagacagagaacctgctcgggagctatttccccaagaagatttctgagctggatgcatttttaaaggagccagctctcaatgaagccaacttgagcaatctgaaggccccattggacatcccagtgcctgatccagtcaaggagaaagagaaagaggagcggaagaaacagcaggagaaggaagacaaggatgaaaagaagaagggggaggatgaagacaaaggtcctccctgtggcccagtgaactgcaatgaaaagatcgtggtccttctgcagcgcttgaagcctgagatcaaggatgtcattgagcagctcaacctggtcaccacctggttgcagctgcagatacctcggattgaggatggtaacaattttggagtggctgtccaggagaaggtgtttgagctgatgaccagcctccacaccaagctagaaggcttccacactcaaatctctaagtatttctctgagcgtggtgatgcagtgactaaagcagccaagcagccccatgtgggtgattatcggcagctggtgcacgagctggatgaggcagagtaccgggacatccggctgatggtcatggagatccgcaatgcttatgctgtgttatatgacatcatcctgaagaacttcgagaagctcaagaagcccaggggagaaacaaagggaatgatctattgagagccctctctcccattctgtgatgagtacagcagagaccttcctgctttttactggggactccagattttccccaaacttgcttctgttgagatttttccctcaccttgcctctcaggcacaataaatatagttataccactgcccatcaaaaaaaaaaaaaaaaaa

SEQ ID NO: 433 - DNA, 5047 bp, Homo Sapiens
gcggcggtcgcagctcgggtccccctcgggcgcccccgccgccgtccgcgcgcggccatggagctggaggtaccggacgaggcggagagcgctgaggcgggggccgtgccctcggaggcggcgtgggcggcagagagcggggcggcggcaggtttggctcagaagaaggcggccccaacagaggttctgtccatgacggcacagccgggccctggccatgggaagaagttgggccatcgaggtgtggacgcatccggcgaaaccacctacaagaagaccacctcctccaccctgaagggtgccatccagctgggcatcggctacaccgtgggccacctgagctccaagcccgaacgcgacgtgctcatgcaggacttctacgtggtggagagcatcttcttccccagcgaaggcagcaacctcacccccgcccaccacttccaggacttccgcttcaagacctatgcacctgtcgccttccgctacttccgggagctctttgggatccggccagatgattacttgtactccctgtgcaatgagccgctgatcgagctgtccaacccgggcgccagtggctccctcttctacgtcaccagcgacgacgagttcatcatcaagaccgtcatgcacaaggaggccgagttcctgcagaagctgctccctggctactacatgaacctcaaccagaacccgcggacgctgctgcccaagttctatgggctgtactgcgtgcagtcggggggcaagaacatccgcgtcgtggtcatgaacaacatcctgccccgcgtggtcaagatgcacctcaagttcgacctcaagggctccacctacaagcggcgcgccagcaagaaggagaaggagaagagcttccccacctacaaggacctggacttcatgcaggacatgcccgaggggctcctgctggacgccgacaccttcagcgccctggtcaagacgctgcagcgggactgcctggtcctggaaagtttcaagatcatggactacagcctgctgctgggcgtgcacaacatcgaccagcacgagcgcgagcggcaggcgcagggcgcccagagcacctcagatgagaagcggcctgtgggccagaaggcgctctactccacggccatggagtccatccagggtggcgccgcgcgcggggaggccatcgaatcggatgacacgatgggcgggatccccgctgtgaacggccgcggggagcggctgctgctgcacattggcatcatcgacatcctgcagtcctacaggttcatcaagaaactggagcacacctggaaggccctcgtccacgatggggacacggtgtccgtccaccgccccagcttctatgccgagcgctttttcaagttcatgagcaacacggtctttcggaagaactcctccctgaagtcctcgccctccaagaaggggcgcggcggagccttgctagctgtgaaaccgctggggcccaccgctgccttctcggccagccagatccctagcgagcgggaggaggcccagtacgacctgcggggggcccgcagctaccccacgctggaggacgaaggccggcccgacctcctgccctgcacgccaccttctttcgaagaagccactacagcctccattgccacgactctgtcatccacatccctctccattcctgagcggtccccctcggagacgtcggagcagccgcggtacaggcggcgcacacagtcgtctggacaggatggcaggccgcaggaggagccacccgcggaagaggatctgcagcagattacagtgcaggtggagcctgcgtgcagcgtggagattgtggtccccaaagaggaggacgcaggggtggaggcttccccggccggtgcctctgctgctgttgaagtagaaactgccagccaggcctcagacgaggagggcgcacctgccagccaggcctcggacgaggaggacgcgcccgccaccgacatctactttcccaccgatgagaggagctgggtgtactccccgctccactatagcgcccaggcccccccggcctccgacggcgagagcgacacataatttctatgcagcccccgacccagagccgagctccacttctgctccggctgcccccgaaggcgctgcccaccccgctgaggcccagagctcgggagatgcccgcctcgccgccccaccggacctcgtcctccccctgcacggatgccgacggccgggcccctccccgacaagcctcccagggccccggcaccccggtcggcagcctgcccctgtgagacccaccctcccgagcggccaatcgcatttgagtccttatttggcacagagacggaagcacgtgtgtgccgttttaggaaaagaacaaaaaagacacaaacaaaccaaccagagggagaagagcccctgcccactgcactctttggttctctgctgtgcctgcctgtgtcctgaggaagaagccaggctgttcgcggtggcctctggggacctgagccccgggggccccatcggcctgcagaggggacggctggggtcccgagcaactctgcctccatccacgtgggaagcggaccctcctgccctcagcttgggtttgggggcctcagtgcaggacatctggcctgaacatcgactgtggggacagccctcgccctgccaagcactgcggccactcagcagctatgttcccgccgcagtggggccctgacgcccacctcccaggtgcccctcgagcaaaaacctctggcgcctccaatccagacccaccacagctggagggccaggcctcctcttccccaggctgccacccacgctggcggagctcagggctggggacttgtccttctcttccaacgtaggccactcagcaactggcatggagggcccaggcaacggagacgttttctccatggcaggacagagcgggaggccgggccttgggccacaggagaccagctcagggcggaaggtcaggctccccgccccctccacgtggagacatggcctagggggccaggcccggctccacaggagtctccttcaggactggtgtggatgtccgccgcctctttcttgtttaagtgatgtgatgtctccgaggaggggagagaagactttgtttccgactcatcaccctccaagagggcagcgctcccagtggtgggactcagcccagactgccctggggcagcttcctgggcccgctgcgctcagagggtgctggttggaggccagagctcggcagagtcacccaccctgcccttccccaggacccctgagaggggcttattggtgatggctgtgggaatcccccacttccaagatgtgcccaggatgtgaggagctggagtggaagctgcacctttgggaagaattcctctccagacctggcagagcctggtgtggggtctgagacggccggagaacctcccaggcagggctctgtgttttgtctgttacaacctccgtatgacgccacgccacccgctgttcacgtcccgtcggcctcctgcacagcccacacgctgcgcccggaaggcccctgctgtggagaagccggacccatccccgaggtccccagcgaggacacacactccacgagagcagcccctccactctgcccaggagaggggccgaccctcctcgggaaccggccagccgcgtggctcccagcatccatcaggacaagcccacgtggggtcctccctgcgtgctcagagggtctgtccagccctgggaagcgaccttggcctcagttcacagcctggtgctcatctgctggcaccgggcatccacccatcagcccccgccctgtccctccgaaggacacccagcaggcaccccccggggaggcaggggcagaggtcagaaggggtgtctgggacctggatggccagcagggacaggggcattgtcatctcaaaggcccaacccccagaggccacaccagtcctcccagggagtcctcgagtcgccctgcccagagccctggcaccagagacgccaagagcctgtggggtgactcggagcagcaggtgtggccccgggcgggcggcaccgcgtccagggcagcctccctccgctgagtgacacgggacaccagtgcccggccgacgcgcctttgcaggagaaatgtgcaaacctctgtggataccatttcatttccattcttgtgttgtctccaaggcccttttggagatatacttggtgttggttgtgttttttggttccttttcagagaactgtaaaccgaggctgacgtgctccactgactgtgccgaggggcgggggcaggaggacggcaagacctatttataatatttagcgaactcggtctccctcagatcccccgcgagggaggctgctggacccaccccgctgtcccccatgatagaagtctgtaaataccttggtgaccaatgcccacttcccctcctgggtcacctctgatggctgctgtccactgagaacgtgggcagtgtccaaattcctgtactgtaaagactaaaaggcgtttgctctgagactgacaaggcggaaacttccatgtgtctcctgccaggctctgtccccctacgccatcccgacacgtccccgttcccccgaaacctggctcagtgcaatactcccattgccatggggtccttcaccatggtactgtctccacagccctcagtccccaccccaggagaggcgcctgccacctcctcctcatctccggtggttcaatcgctccgcctgtccccaacccagtcccatttttatggccaaactgattctgaaacaaaatgaaactgcaaacctcgtgtgtcttaactccccccagggatgccactccattcctccgccccgtggtctggtgcgtgacaatccaaagcgccgagacgagggtgctgtgtccctcaaacccagagtggtgggcgcctctgaaaccatacagccactcctggccccaaacactggtttgcatcccaggttcctcgcccacctacccccgccacaccccgtctttttagagatctctctaataaatcgggtaataagc

SEQ ID NO: 434 - DNA, 2204 bp, Homo Sapiens
cagggctcggcggcaggtgcctcgtcgcgcacactcgcgggccgcggggaccggctcgggcgcggggccggctggggcggggcggggcggcggcgcgcgttccccgccggccacaccggccgccctgcactcggcgaggggcgtgtgcgcgggcctggcacccgcgggccccatgttcaccgagctgaggtccaagctgagccccccgcgtggccgcgccggggccgtgcgcgcgggcttcggggagcgccgggatgtggacgccactgcccacttcagcttctgccggaccctcctggagcacacggtgtcagctgagagcatcccctgccacttgcctcggacacctggcaccagcctcacgtggcatgactcccgcagccagagggcggccagcagcaggccaatcaagctcctgcagcagcccggcacagacaccccccagggccggctgtactctgaccactatggcctgtaccatacaagcccctcgctgggtggcctgacccggcccgtggtcctgtggagtcagcaggacgtctgcaagtggctcaagaagcactgtccccacaactacctcgtctacgtggaggccttctcccagcatgccatcaccggccgggcactgctgcggctgaatgcggagaagctgcagcggatggggctggcccaggaggcccagaggcaggaggtgctgcagcaggtgctccgcctgcaggtgcgtgaggaggggcggagcctgcagctgctcagccaagcttccttcgggaaaatgtcctagctgctgctgaggcttgaacccagaccccagcactgtgatgggagtccacggctagggaggaggccaagctggccccgcagcgcctcttggaccctgcgggatgccggggcggccaggctggcccaacggacagacaggaccaggatcacacctccaggcgcctctggttggacattccaggtcgtgccctggggctgggtgggtagggggctgcttgagtgtggccccacctcctgggacctgagcccaagccctcccctggtgcagctggcagcatgtggggcagctgcctggagccagaaccggtttggatgtcccccctagactcccagggagtctgtttatttacattcccctctccacgtgatgtcggtcccccatcgcctgctgagtcacttgtctgtccacccacccagcccagttctaggtcgttccccagcacctccaggttggcccacacaggtaccataagctgcctcggctccctgtggcttgtgcccatgcacctgccagggcccagcaggccaacccatcatctagagtagtggccatcagcacccgcctaacgggcaccatgccaagcactttcatcattatttatacatcgtcaccacaccccctctattcatgagaagtaaagctgagaaaggaccagattgaccaagcgccagagacaaaatgtggcacaacgagaaccccagccctgtccaggtggctccgcgcccagggcccaggcttagcagtgctccctgccctatctttgggaaaatcttgcttttatggtcttcccccctctcgccctcaagaacaagggccttgtgcgtgggccttcccattgctgctttcccaagaaggcctggattcaggggagaggccttcccagggccactccccttacaccctcccagaggcctgagcaacccctctctgggtggtttggggctggtgctgcctggcggaaggacagtgagggcggccctagccgcctccaccctcttgcgcctctgccctctcccagtccccctgtggcttctgaaaatctcagggacagatgaggctgagcccctagtcccctctgtgtgctttgagcctccagactcgaggctggtcactgcaggtcccaggtggaatttggacaactggcctggccgctcccatcctgtaagcccccaccacggggagaccctcatccctgcccctgtgtggctgcgcaagtattctgcccgcctcccaccatcagccttcgcccaaggggcccttctgcctctgcttccctcccttctcctctgtcttgccctggcccacgcacgcctgtctcgtcttccttgttttgctgcactcacttttttatactctgacaaaaaaaaaaaatcagaaataaagctggttcccaagtgaaaaaaaaaaaaaaaaaaaaaaaaaa

SEQ ID NO: 435 - DNA, 3621 bp, Homo Sapiens
gagaaccggatgaggcggcgaccgtgaggccgagccgggagcgggcgtcttgccgaggcccgggcgggcggggagcaacggctacagacgccgcggggccaggtcgttgagggtcggcggcgggcgaggagcgcagggcgctcgggccgggggccgccggcgccatgggcaaccgcgggatggaagagctgatcccgctggtcaacaaactgcaggacgccttcagctccatcggccagagctgccacctggacctgccgcagatcgctgtagtgggcggccagagcgccggcaagagctcggtgctggagaacttcgtgggccgggacttccttccccgcggttcaggaatcgtcacccggcggcctctcattctgcagctcatcttctcaaaaacagaacatgccgagtttttgcactgcaagtccaaaaagtttacagactttgatgaagtccggcaggagattgaagcagagaccgacagggtcacggggaccaacaaaggcatctccccagtgcccatcaaccttcgagtctactcgccacacgtgttgaacttgaccctcatcgacctcccgggtatcaccaaggtgcctgtgggcgaccagcctccagacatcgagtaccagatcaaggacatgatcctgcagttcatcagccgggagagcagcctcattctggctgtcacgcccgccaacatggacctggccaactccgacgccctcaagctggccaaggaagtcgatccccaaggcctacggaccatcggtgtcatcaccaagcttgacctgatggacgagggcaccgacgccagggacgtcttggagaacaagttgctcccgttgagaagaggctacattggcgtggtgaaccgcagccagaaggatattgagggcaagaaggacatccgtgcagcactggcagctgagaggaagttcttcctctcccacccggcctaccggcacatggccgaccgcatgggcacgccacatctgcagaagacgctgaatcagcaactgaccaaccacatccgggagtcgctgccggccctacgtagcaaactacagagccagctgctgtccctggagaaggaggtggaggagtacaagaactttcggcccgacgaccccacccgcaaaaccaaagccctgctgcagatggtccagcagtttggggtggattttgagaagaggatcgagggctcaggagatcaggtggacactctggagctctccgggggcgcccgaatcaatcgcatcttccacgagcggttcccatttgagctggtgaagatggagtttgacgagaaggacttacgacgggagatcagctatgccattaagaacatccatggagtcaggacggggctcttcacccccgacatggcctttgaagccattgtgaaaaaacagattgtaaaactcaaagagccgagtttgaagtgtgttgatctcgtggtctcagagctggccacggtcataaaaaagtgtgccgagaagctcagttcctacccccggttgcgagaggagacagagcgaatcgtcaccacttacatccgggaacgggaggggagaacgaaggaccagattcttctgctgatcgacattgagcagtcctacatcaacacgaaccatgaggacttcatcgggtttgccaatgcccagcagaggagcacgcagctgaacaagaagagagccatccccaatcaggtgatccgcaggggctggctgaccatcaacaacatcagcctgatgaaaggcggctccaaggagtactggtttgtgctgactgccgagtcactgtcctggtacaaggatgaggaggagaaagagaagaagtacatgctgcctctggacaacctcaagatccgtgatgtggagaagggcttcatgtccaacaagcacgtcttcgccatcttcaacacggagcagagaaacgtctacaaggacctgcggcagatcgagctggcctgtgactcccaggaagacgtggacagctggaaggcctcgttcctccgagctggcgtctaccccgagaaggaccaggcagaaaacgaggatggggcccaggagaacaccttctccatggacccccaactggagcggcaggtggagaccattcgcaacctggtggactcatacgtggccatcatcaacaagtccatccgcgacctcatgccaaagaccatcatgcacctcatgatcaacaatacgaaggccttcatccaccacgagctgctggcctacctatactcctcggcagaccagagcagcctcatggaggagtcggctgaccaggcacagcggcgggacgacatgctgcgcatgtaccatgccctcaaggaggcgctcaacatcatcggtgacatcagcaccagcactgtgtccacgcctgtacccccgcctgtcgatgacacctggctccagagcgccagcagccacagccccactccacagcgccgaccggtgtccagcatacacccccctggccggcccccagcagtgaggggccccactccagggccccccctgattcctgttcccgtgggggcagcagcctccttctcggcgcccccaatcccatcccggcctggaccccagagcgtgtttgccaacagtgacctcttcccagccccgcctcagatcccatctcggccagttcggatccccccagggattcccccaggagtgcccagcagaagaccccctgctgcgcccagccggcccaccattatccgcccagccgagccatccctgctcgactaggcctcgaggggggcgtgctctcgggggggcctcacgcacccgcggcgcaggagcttcagtggtctggggccctccgccgcccctatgctgggaccaggctcccagtgggcagccctggcctcttccttaacgctggccccggtccagggccggcccctgtgcctggctggacaccgcactgcgcaaaggggccctggagctccaggcagggggcgctggggtgttgcactttgggggatggagtctcagggtggcagaggggggaccagaacccttgacaccatcctgaatgaggggtccagcctgggggggactctaccaaggtcttcttgggctgggaaagcccatgtagggcaggccttctataagtgcgggcaccaagggcgcctacatccccaggccttgctggggtgcaggggtatatcaacttcccattagcaggagctccccagcggcaagcctggcccagtgggctcggtagtgcccagctggcaggcctgaggtgtacatagtccttcccggccatattaaccacacagcctgagcctggcccagcctcggctgccagaggtgcctttgctaggcccggagccgttggcccgggccggccttgccctattcctctcctcctcctcctcctgggtcccccagggtggctgggcttgggctatgtgggtggtggtggcggggggtcttgggggcctctcagctcccgcccatgcctccctgatgggtgggcccagggcggcctctctctgaggagacctcacccactcctcgctcagtttgaccactgtaagtgcctgcactctgtattctattaataaactaaaataaagggaagacgctgctggtg

SEQ ID NO: 436 - DNA, 6099 bp, Homo Sapiens
gctgaggctgcaagtagccggcgccgtcccgcgtcgcccccgcgcagggcgggccccgcacgcttattctgcccgggaggaacgccggcgtccagcccgctaccgaccgccgctgcgggatgctgcgctccacgtccacggtcaccctgctctcgggcggcgccgccaggacgcccggggcgcccagcaggagggcaaatgtttgcagactacggctgaccgtacctcctgagagtccagttcctgagcaatgtgaaaagaagattgagagaaaagagcagcttcttgacctgagcaatggagaacctaccaggaaacttcctcagggtgttgtttatggtgtggtgcgaagatcagatcaaaatcagcagaaagaaatggtggtgtatgggtggtccaccagtcagctgaaagaagagatgaactacatcaaagatgtgagagccactttggaaaaggtgagaaagcgaatgtatggagactatgatgagatgagacagaagattcgacagctcacccaggaactatcagtttcccatgctcagcaggagtatctggagaatcacatccaaacccagtcgtctgccctggatcgttttaatgccatgaactcagccttggcatcagattccattggcctgcaaaaaaccctcgtggatgtgactttggaaaacagcaacattaaggatcaaatcagaaatctgcagcagacgtatgaagcatccatggacaagctgagggaaaagcagaggcagttggaggtagcgcaagttgaaaaccagctgctaaaaatgaaggtggaatcgtcccaagaagccaatgctgaggtgatgcgagagatgaccaagaagctgtacagccagtatgaggagaagctgcaggaagaacagaggaagcacagtgctgagaaggaggctcttttggaagaaaccaatagttttctgaaagcgattgaagaagccaataaaaagatgcaagcagcagagatcagcctagaggagaaagaccagaggatcggggagctggacaggctgattgagcgcatggaaaaggaacgtcatcaactgcaacttcaactcctagaacatgaaacagaaatgtctggggagttaactgattctgacaaggaaaggtatcagcagttggaggaggcatcagccagcctccgtgagcggatcagacacctagatgacatggtgcattgccagcagaagaaagtcaagcagatggtcgaggagaataatgaactacaaagcaggttggactatttaacagaaacccaggccaagactgaagtggaaaccagagagataggagtgggctgtgatcttctacccagccaaacaggcaggactcgtgaaattgtgatgccttctaggaactacaccccatacacaagagtcctggagttaaccatgaagaaaactctgacttaggcactcagaggcatacactttttacagatggacaaaagctctggaaccctgtggcttcaaatcctttgggaagggtgactgttgtttcccctacacacagtgtaagccggaatgggaatcgctgaggctctgatccacttctaagacaggaaggaaagtgaaggcagagtgagcaggtaaatacctagcagaagaatggctgggtcaaacggtatattttaagaaactgccaaactggtttccaaagaggttgtactattttgcattcccattagcagtgtatcaaagttccagttgctctacatcctttacaacacttggaatggtcagtctttctggcaaagtagaaaattcgaaaaggtcctcaacgagtttgtacagctgctcccactccctcatcacctcttgtgggcctttggaaatgtatgttggaggagacattttggattgttgcaatgacttgggagtgccatagcacctagcaggcagaagccagaaacaccaaatgtcttaacaatgcttgaggcggtgctacaaatgaagtccttctccaaatgcattgagccccaagaaaaatcgctgattctgaggaaccttccaactttaacaatttcaggacgtccctaagctgagctaggaggcaccacgcacaggccggaggcaccacgcacaggccagagtctcccaaatcctgtcccgcactctctcccaccttattaatggccagctcatctttcaagtttcgacttgaaccacttctcagagatatcttcccagaaaattcatttgcaaattgcccgacaaaggtaaaaagatctttgactcttttgccaaactgaaagctgccattgcagaatgtgaagaagttagaagaaaaagtgaactgtttaaccctgttagtttagactgtaagctaaggcaaaaagcaattgcagaagttgatgtgggtacagataaggcccagaattctgacccgatacttgatacttcatcactagttcctggatgttcctctgtagataacatcaagtcatctcaaacctcacaaaaccagggacttggacgtcctactcttgaaggtgatgaagagacttcagaggttgagtacacagtgaataagggcccagcttccagcaatagagacagggtaccaccttcatctgaagctagtgagcatcacccgcggcatcgtgtttcaagtcaagcggaagatacttccagcagctttgacaacctgtttattgacaggttacagaggatcaccattgcggaccaaggtgaacaacagtcagaagaaaacgcaagtactaagaacttgacaggcctttccagtgggactgagaagaaacctcattacatggaagtgctagaaatgcgagccaaaaacccagtgccccagctgcgtaaatttaaaaccaatgtgttaccttttcgacaaaatgattcatctagtcattgccagaagagtgggtctcctatttcctcagaagagcggcggcgcagggataagcagcatcttgatgacatcacagcagctcggcttctaccacttcaccatatgcccacgcagctgctctccatagaagaatccttggcacttcagaaacagcagaaacagaattatgaggagatgcaagcaaagctcgcagcgcaaaaattagctgaaagactgaatattaaaatgcggagttataatccagaaggggagtcttcagggagataccgagaagtaagggatgaagatgacgattggtcctctgatgaattctgaagataatctcctaaatcactgacgttgagatgtcatcatcttacatcagactttctaactagtatcaagatcagtgtcagatattgttgagggaagtaattttataaagttacacaaaggtagttataaaaaaagcccagtttgtctttcagaaggtgactttcatgtgcttgaaaagtttaatatttgaatattgtgtttaaccacatggtattaaaattttgcaatatattgtgtattggtctgatattttagtatatagtagaacatactttttttttctttaagccaaatgaaaagaggtaactttgcttttttcctttttcttacctatcaaatagcatttattacatgtctttcagtgaaatacttagttgttccaggcacctaaaatcaattaggaagacatagttcccttcttttttgggtaatgaagggagcagtctaaagaattgtatgcatgtttgcatggggttattgagacattggatgtgaaatacctaggaagacatgtatggagaatgcttaacaaatgctcttctcctttttctgtcttcccttaggaagaacgttatctctcttctgattaggaaggacttcccttttgagtagatgctggaaagtggaggttttttttgttggtttgtttgtttggttttgtgtttttttttgagatggggtcttgctctgtcgcccaggctggagtgcagtggcaggatctcggctcactgcaatctaggtggaggtctttttaaataacctcatgttacttcaggcaaatctggtacaggagaagcccaagctaactgagctgggtgaaggcttgtgcatcacctggcttgagttccttgctgtcacagatgataggttcatgtacacaacattaatgtttgataaggaaagcattttttttttgttaaaattgaattgtcagtactttacttttttccccccaaataggtatatatagactgcagaagcttcagtcccatatataaacgttcatgtcattttagaggattatatggttgtctccagagaaattaacttacattatcaaaaaattctttgtctaatatattggagtctttaaaagtgttgaagaataaaatattaattagaacaacttcaaatgctaaggtgatgttttaccgggacttaattaaatacaactttttcctttcgaaaaagactgttcacatttgcttccaggtgtaattattgctttcattccttacccccctcaagcaaatgtgaaaagtatactgacctaagattctcattagttttagttcttaaaacgaatagtaaatgatttcacagcgtaaaatttgatgttatttctggaagctggatgatatggaagagttcatgtgcctggacacacagttccctgtaatcctgccatctagggagataaactctgttaacattttgatgttgtgtttttgcttatttttctatgcatagttatgcatttatattctcaaaaatgaaatcataatgtacattgctttgtagtctgctctatatattgtcaatatgttcccatattaaatattttgctttttagacagctgtaggatattttatttcatgggtataccataactttaagatttatttcctattcagcaatttgattatgtattataatgtaatctgtaaatagtgatatgattaacatcttaatcacatccatagaaaatgacttatttccagaagataccgctctaaaaatgaaattgttaggtgaaagtgtttttgagaatttttatatatattactcactgcagagatcatgttcatttacattcccattagcaatatatccaatgctcagaattgaaaattactacttaaaatctttgcaaattgaataattacagaaaagggctacatttaaaatttgtatttgtttttcttacttagtgaaggttgtgttttttttcatattcattggccatgctatattcattcttttgagaattgctcattcatattttttctgttgcttgcttggagaatttgctctttttttggcatataagttcttaagaatgtccgtcctttgtcatatattgtaactttttttagccttatttgtcatttaacatagtttgtggtatttcagtatagaagttgttttctttaggagtctacctttgtgtatgtgcttgaaagtatttttgtaatccaagaatggataaatgtccttattttcttctagtattttcttatttcacttttacacctatctttaaaaggaatttaaattttgtttatatacattaactaaatcagtacaagtttggggtgaaaaggaaatttttaatccatctcaaatgtatttggttatattatataaggtagggatttgattttatttcgaagaatttaccaattggttcagtatgtgaaaccaccatttcccctctgattagtaatgctatttttatagaatattaaattcttatgtgtcttttgtgtcttaggccaatttctgggccttctgggttttttctacactgtcaataattatcgctttaattggtgttaatatttggtagtacacaggttctcccttgttcttttaaattttgtgaaatataacttacaaataagtacttaaaacagagcttaatgggtaaagcaacagctgtgtaatcacaaactagatgcagaggaggtcttgccagcactccaaaatctctgtgtgtcccctcttgacactcactgtttcccccagagctaactatcctgacgtatggtaattctccctctgtccttttaagaattattttaccagttatgtgtataacaatatggtttacattttgctcacttttgacttatataaaaatagaataatactaaaaaaaaaaaaaaaaa

SEQ ID NO: 437 - DNA, 2559 bp, Homo Sapiens
cagccgagttcagccgggagcagagcgaaccgcaccggcccgagcggagcgccgcacgttcccaaccgcgaggccagacatctgactgttggtgtgagaccagtgctcctggtggtgtgccctgagccatggaggcgcctttgcagacagagatggtggagctggtgcccaatggcaaacactcagaggggctgctcccggtcatcacccccatggcaggcaaccagagggtcgaggaccctgcacggagctgtatggagggcaagagcttcctacagaaaagtcccagcaaggagccacacttcactgacttcgaggggaagacatcattcgggatgtcagtgttcaacctcagcaatgccatcatgggcagcggcatcctgggactcgcctatgccatggccaatacgggcattatccttttcctgttcctgttgacagctgtcgccttgctctccagctactccatccacctgctactcaagtcctcaggggtcgtgggcatccgtgcctatgagcagctgggctaccgtgcctttgggaccccaggaaagctggcagcagccctggccatcacgctccagaacatcggagccatgtccagctacctgtacatcatcaagtctgagctgccacttgtcatacagaccttcctgaacctggaggagaaaacctcggactggtacatgaacgggaactacctggtaatccttgtctctgtcaccatcattctgcccctggcactgatgcggcagcttggctacctgggctactccagcggcttctctcttagctgcatggtgttcttcctaattgcagtcatctacaaaaagttccacgtgccctgcccactgccccccaacttcaacaacaccacaggcaacttcagccacgtggagatcgtgaaggagaaggtgcagctgcaggtcgagcctgaggcttcagccttctgcactcccagctacttcacgctcaactcacagacagcatacaccatccccatcatggccttcgccttcgtctgccaccccgaggtgctgcccatctatactgagctcaaggacccctccaagaagaagatgcagcacatctccaacctgtccatcgctgtcatgtacatcatgtacttcctggctgccctcttcggctacctcaccttctacaacggggtggagtcggagctgctgcacacctacagcaaggtggacccgtttgacgtcctgatcctgtgtgtgcgcgtggccgtgctgacagcagtcacgctcacagtgcccatcgttctgttcccggtgcgccgcgccatccagcagatgctgtttccaaaccaggagttcagctggctgcggcatgtgcttattgccgttggcctgctcacttgtatcaacctgctggtcatctttgcccccaacatcctgggcatctttggggtcatcggtgccacatctgccccattcctcatcttcatcttccctgccatcttctacttccgaatcatgcccacggagaaggagcctgcaagatccacccccaaaatcctggccctgtgttttgctatgcttggcttcttgctgatgaccatgagcttgagcttcatcatcattgactgggcctcagggaccagccggcatggaggaaaccactagggtgaccctcatcctgttctgtctactcaccctagcagccctgcccagactcttcagcccctgctcccatccagtggccagtcgggggaggagaaagacgcgattaacactgtggcattcagccaggccccatgtcctctctgtggaaggtttttgttcaagagccaggaccaaggcccttgggccactaccctgctaggctctggagctgtagaggcttcctgaactgggagcagggtagggctgtcgccttagatcccgcccaagcccctcattccctccttgcacagatgcatacactggggcccagcagctgcctcctgaggtgacacagcctgtaggaacatacacagctgggatcagcctgcagccatcccccgaccctgctgctaggccacggtctgcgccctggggcctcatctcccccagcccacttgttttccccccttttattccctaggcccttttcagactcctgggcccttggatactcttctcccatctcccttcacaggatgacaccctcccataccccatagctggggccagcaggttctgctgagggtggggctggtgtagggacccccaagagacccctgtcctgtcccttcaccagtcctggggaggctgggactccccctgccacaagcctgggccacagctcacattccactgctgggagaagaaacaggccgaggcccagagtggcctgcccccgggagccaaagaccccagtggccacactgggatagggtggggaggctggcagccctcttttataaatattatacataaaaaaaaaaaaaaaaaaaaaaaaaaaaaaaaaaaaaaaaaaaaaaaaaaaaaaaaaaaaaaaaaaaaaaaaaaaaaaaaaaaaaaaaaaaaaaaaaaaaaaaaaaaaaaaaaaaaaaaaaaa

SEQ ID NO: 438 - DNA, 2948 bp, Homo Sapiens
gcgtgcgcaatgggccacagaaccgccatgccggaaccgcgcgggtcgtcgcagctgcgggtgaacgcggcgtttgccgcgcggtacaaccgctaccgggagcgcgaggaactgcagcggcgaatttgatccccagcaggagcgggacttttacaaaacgctctccttgttgaagaagaaggacccccgcatttatcagaaagatgccaccttctataacagaacagcatcgtcatcagacagtgaggaggacccagaagccttggagaagcagaagaaagtgcggcccatgtacctgaaggactacgagaggaaggttatcttggagaaggcaggcaaatatgttgatgaggagaactcagacggggagacttccaatcacagactccaggagacatcgtcgcaaagttatgtggaggaacagaaacagctcaaggaaagcttccgggcatttgtggaggacagtgaggacgaggacggcgctggggagggcggctccagtttgctgcagaaacgtgccaaaaccaggcaggagaaggcccaggaggaggccgactacatcgagtggctgaagggacagaaagagattcggaacccagattccctgaaggaactgacgcatctcaaggaatactggaacgaccctgagttggatgaaggggagcggttcctgcgggattacatcctcaacaaacgctatgaggaggaggaagaggaggaggaagatgaagaggaaatggaggaagagaagggggtccacggtcccccagtccagctggctgtggacgactcctcagacgaaggggagctgtttctgaagaaacaggaggactttgaacagaagtacaatttccgtttcgaggagccggactcagcatcggtcaagacctacccacgcagcatcgcgtcctccgtgcgccgtaaggatgagcgcagaaaggagaagagggaagagactcgggagcgaaagaagagggagaaagcaaagaagcaggaagagctcaagcagctgaagaacctgaagaggaaggagattctggccaagctggagaagctgcggaaagtaacaggcaacgagatgctgggcctcgaggagggggaccttgaagacgacttcgaccctgcccagcacgaccagctcatgcagaagtgctttggggacgagtactacggggccgtggaggaggagaagccacaatttgaggaagaagaagggcttgaagacgactggaactgggacacgtgggacgggcctgagcaggagggagactggagccagcaggagctgcactgtgaggaccccaacttcaacatggacgccgactacgaccccagccagccgaggaagaaaaagcgcgaggcccccttgacgggcaagaagaagcgcaagtcgcccttcgccgcggccgtggggcaggagaagcccgtgttcgaacccggggacaagacgttcgaggagtacctggatgagtattaccggctggactacgaggacatcatcgacgacctgccctgtcgcttcaagtaccgcacagtggtgccctgtgactttggcctcagcactgaggagatcctcgctgctgacgataaggagctgaaccggtggtgctccctaaagaagacctgcatgtacaggtcagagcaggaggagctgcgggacaagcgggcgtacagccagaaggcccagaactcatggaaaaagcggcaggtcttcaagtcactctgccgagaagaggcagagacacctgcggaagccacagggaagccacagagagatgaagccggcccacagaggcagctgccagcccttgatggcagcttgatggggccggagagtcccccagcacaggaagaggaagcccctgtatcaccccacaagaagccagccccccagaagcggaggagggccaagaaggcacggctgctgggccccactgtgatgcttggtggatgcgagttcagccgccagagactgcaggcctttggcctcaaccccaaacggctgcacttccgccagctgggccggcagcggaggaaacaacaggggcccaagaacagctcctgagcaccagggagcaggcaggggcctcaggctcctctcctcaaatcaagccctggacaggtctcgcacccacaagtactatctgctgcagagatcctctcatctgtggccaggcacgcctgtaatcccagcactttgggaggccgaggtgaaaggatcacttgagcccaggaattggagaccagcgtgggcaacttagcgagactccatctctacaaaatgtggtgacacatgcctgtagtcccagctactcaggaggctggggaaggaagatcacttaaggccatgagtttgaggctacagagagctatgattgcaccactgcactccagcctgggcaacaaagcaagaccctgtctcttgaaaaaaaaaaaaaaattaaaaaacacgtgtagctgtgggtaaggaagtcgtcccattttatggatgtggaaactgaggctgacttaaacttcccgtgacttggagctctcacctcgagacacctcccagaccccacatcccctcagaacgctgcgcccagccacacccacgatcaagttacacagctttattggcccccagcagccacagttcccccaagggggctttgggacagggagggcccgggcgtccagtgcaaactacagtacgtgagtcaggccctgaggggggtgcccggggtcctccttccctaccctgccaggagggccccgctggtgggagacaggtgtatgggctctgtgggctctgtccctggctgaatggccccagactggttgcagctgggcttgaggggctgacaacaggaagtaccatcatcactgccagagctcaagatcccacacccgacatgacataaataaaaaaataaatagtgttgtatctttaaaaaaaaaaaaaaaaa

SEQ ID NO: 439 - DNA, 1352 bp, Homo Sapiens
gaggaagagagcagctcgcttctaactggactgcacgttggtgacagcgtcccaagctggtgacagacccactctgtaactttcagctagattcagccaccagatcccagaaacatgacccttgctgcctacaaagagaagatgaaggagctcccgctggtgtccttgttctgctcctgcttcctggccgatcccctgaataagtcgtcctacaaatatgaaggctggtgtgggagacagtgtaggaggaaggatgaaagccagcggaaagacagtgctgactggagagaaagaagagctcaggcagacacggtggacctgaattggtgcgtcatttccgacatggaagtcatcgagctgaacaaatgcacctcgggccaatcctttgaagtcatcctgaagccaccctcctttgatggggttcccgagttcaacgcctccctgccaaggcggcgagacccatccctggaagagatccagaagaaactagaagcggctgaggagcgaaggaagtaccaggaagcggagctcctgaaacacctagcagagaaacgggaacatgagagagaggtgatccaaaaggccattgaggaaaacaacaacttcatcaagatggctaaggaaaaactggcccagaagatggaatccaacaaggagaacagggaggcccacctcgccgccatgttggaacggctgcaagagaaggacaagcacgccgaggaggtgcggaaaaacaaggagctgaaggaagaggcctccaggtaaagcctagaggccaaagaactttccaggtcagccggacagctccagcagctccacgttccaggcagcctcgcccgccggctgcgctcccagcactggggtttggggggaggggggtggccaaggggcgtttcctctgcttttggtgtttgtacatgttaagaattgaccagtgaagccatcctatttgtttccggggaacaatgacggggtgggagaggggagaggagagagtttgggaaagggagatggagaagaactcaaggacattgcaaccctgcccggcgcagatctgattttcacatctctacctggacattgagcctccaggcaccatgttgaggagagatgaaaaccagggcggtagaacttcagggtgaaggacagagtcctgggtggggcagcggctgcagggcgcaccagagaacccagccagaggggttgtgagtaccagtggtgttgcttccaccctgcagcaggtgggatgaggtctgtgtgtgtgtgtgaaccatcattttttgatcatcatgaccaatgaaacattgactccaaaaaaaaaaaaaaaaaaaaaaaaaaaaaaaaaaaaaaaa

SEQ ID NO: 440 - DNA, 1209 bp, Homo Sapiens
cggcccagggcgcaggcgcgggtgtcggtcccaccgcgcgtcgtcctcgccccggccccggccaatcccttcgaatttggccgaggccgggaaatactagctaatcacggcgcgcgctgttgacgccggccaatgggagctccggaaggctgcgtggagacgccagcggcgggcggtggacagtcatggcggcccggcgcggggctctcatagtgctggagggcgtggaccgcgccgggaagagcacgcagagccgcaagctggtggaagcgctgtgcgccgcgggccaccgcgccgaactgctccggttcccggaaagatcaactgaaatcggcaaacttctgagttcctacttgcaaaagaaaagtgacgtggaggatcactcggtgcacctgcttttttctgcaaatcgctgggaacaagtgccgttaattaaggaaaagttgagccagggcgtgaccctcgtcgtggacagatacgcattttctggtgtggccttcaccggtgccaaggagaatttttccctagattggtgtaaacagccagacgtgggccttcccaaacccgacctggtcctgttcctccagttacagctggcggatgctgccaagcggggagcgtttggccatgagcgctatgagaacggggctttccaggagcgggcgctccggtgtttccaccagctcatgaaagacacgactttgaactggaagatggtggatgcttccaaaagcatcgaagctgtccatgaggacatccgcgtgctctctgaggacgccatccgcactgccacagagaagccgctgggggagctatggaagtgacccaaggctgcccactggagacgcctctccctgcagtcccccgagaggtgggagactcgcggaaggccccgtccccagcagagtccagaccccacaacttcaggagctctttcccggcagcagagatctgcaggctgcctcttctgccccggagctggggtgcactggggacccccgtggtggggaccttggcagtgtggacatgagcagagcgatggagcagtctcctgccctctcccctgtcctgatggcactctgttgtattttcttactgaagttcagtgataactctgagcagtttcattgtgatcactgtaaatggtaatcagttggaattctcctaaatgtcttccagacactagtaaaaaacgacctgaaaattgtt

SEQ ID NO: 441 - DNA, 996 bp, Homo Sapiens
atggaggaaatgtctttgtctggcctgaataacagcaaactagaggccatagctcgggagatataagcggacctagtctagaattcttgttcgggattctgctttgaggtacaccaggctgtcatgtgtggctacctctttctggatgacacagaccctaatagcatgaaggatattggttttcaaccagtggaagagcaaagagtgtgtttgccccaactgcaactgtagcattcctgcctcccgttttgctccccatctggataggtgcctgggaatgggtgggaatagcggccgaatcgccatccactggattgccaatagcaacaatatgggcaagtctgagagtgaccaagaggataatgatgacatcaatgacaatgactggtcctatggctcagagaataaagccaagaagagaaaatcaggcaagaaccccgattcccctcgaagatctgagtctttgaaacacaaaaatggggaactttgtgatttgattttttgtaagtataacaactcaactgggatcagctacgaaacctggggccagaggagcttcatatcctgctaagcatgcaatgtaggatgatttctgaagataccaagaagatgtgcacaaagtccctgcactgcccacagcacacagttgagcagaagtgaaccttgcagatgtatttcttcagggcctcagctgtccatccagaggtggagagctcccaggataatgacagctttgacatgactgacagccaggccctgatcagccagcttcagtgggtctgctcctctgatctctcaccctgtgattcaggctcccccaagacgagcgaaaatcagggatggggtctaggtaccaacagctctgagacacagaaaaccaagaaaaagaaatcccatctgagcctggtagggacttcctccgacctgggctccaacaggaagaagccaaagctaccgatacccccgacggccagcatctatgatgacatcaactga

SEQ ID NO: 442 - DNA, 1873 bp, Homo Sapiens
gacgatacgccgggcgcaggcgcagaagccgcgcccgtccgcggcgccgccagccagggcggaaacggctgcggcttcgctagggacgcatgcgcgggtcccttagttttcgcgagataacggtcgaaaacgcgctcttgtcgatttcctgtagtgaatcaggcaccggagtgcaggttcgggggtggaatccttgggccgctgggcaagcggcgagacctggccagggccagcgagccgaggacagagggcgcacggagggccgggccgcagccccggccgcttgcagaccccgccatggacccgttcctggtgctgctgcactcggtgtcgtccagcctgtcgagcagcgagctgaccgagctcaagttcctatgcctcgggcgcgtgggcaagcgcaagctggagcgcgtgcagagcggcctagacctcttctccatgctgctggagcagaacgacctggagcccgggcacaccgagctcctgcgcgagctgctcgcctccctgcggcgccacgacctgctgcggcgcgtcgacgacttcgaggcgggggcggcggccggggccgcgcctggggaagaagacctgtgtgcagcatttaacgtcatatgtgataatgtggggaaagattggagaaggctggctcgtcagctcaaagtctcagacaccaagatcgacagcatcgaggacagatacccccgcaacctgacagagcgtgtgcgggagtcactgagaatctggaagaacacagagaaggagaacgcaacagtggcccacctggtgggggctctcaggtcctgccagatgaacctggtggctgacctggtacaagaggttcagcaggcccgtgacctccagaacaggagtggggccatgtccccgatgtcatggaactcagacgcatctacctccgaagcgtcctgatgggccgctgctttgcgctggtggaccacaggcatctacacagcctggactttggttctctccaggaaggtagcccagcactgtgaagacccagcaggaagccaggctgagtgagccacagaccacctgcttctgaactcaagctgcgtttattaatgcctctcccgcaccaggccgggcttgggccctgcacagatatttccatttcttcctcactatgacactgagcaagatcttgtctccactaaatgagctcctgcgggagtagttggaaagttggaaccgtgtccagcacagaaggaatctgtgcagatgagcagtcacactgttactccacagcggaggagaccagctcagaggcccaggaatcggagcgaagcagagaggtggagaactgggatttgaacccccgccatccttcaccagagcccatgctcaaccactgtggcgttctgctgcccctgcagttggcagaaaggatgttttgtcccatttccttggaggccaccgggacagacctggacactagggtcaggcggggtgcgtggtggggagaggcatggctggggtgggggtggggagacctggttggccgtggtccagctcttggcccctgtgtgagttgagtctcctctctgagactgctaagtaggggcagtgatggttgccaggacgaattgagataatatctgtgaggtgctgatgagtgattgacacacagcactctctaaatcttccttgtgaggattatgggtcctgcaattctacagtttcttactgttttgtatcaaaatcactatctttctgataacagaattgccaaggcagcgggatctcgtatctttaaaaagcagtcctcttattcctaaggtaatcctattaaaacacagctttacaacttccatatcacaaaaaaaaaaaaaaaaaaaaaaaaaaaaaaaaaaaaaaa

SEQ ID NO: 443 - DNA, 7182 bp, Homo Sapiens
gcgctggcgcgagcccacgaagaggtacgattccggagaatcgcgaggcagagcgggagcgcgcagccaggtggaaactaattctaagccagactgctggagatcaccctgttctagtgtgtggaggcttccaccaggaggcgcattggagtgactgtctggcatcaccaagatgacactccacgccacccggggggctgcactcctctcttgggtgaacagtctacacgtggctgaccctgtggaggctgtgctgcagctccaggactgcagcatcttcatcaagatcattgacagaatccatggcactgaagagggacagcaaatcttgaagcagccggtgtcagagagactggactttgtgtgcagttttctgcagaaaaatcgaaaacatccctcttccccagaatgcctggtatctgcacagaaggtgctagagggatcagagctggaactggcgaagatgaccatgctgctcttataccactctaccatgagctccaaaagtcccagggactgggaacagtttgaatataaaattcaggctgagttggctgtcattcttaaatttgtgctggaccatgaggacgggctaaaccttaatgaggacctagagaacttcctacagaaagctcctgtgccttctacctgttctagcacattccctgaagagctctccccacctagccaccaggccaagagggagattcgcttcctagagctacagaaggttgcctcctcttccagtgggaacaactttctctcaggttctccagcttctcccatgggtgatatcctgcagaccccacagttccagatgagacggctgaagaagcagcttgctgatgagagaagtaatagggatgagctggagctggagctagctgagaaccgcaagctcctcaccgagaaggatgcacagatagccatgatgcagcagcgcattgaccgcctagccctgctgaatgagaagcaggcggccagcccactggagcccaaggagcttgaggagctgcgtgacaagaatgagagccttaccatgcggctgcatgaaaccctgaagcagtgccaggacctgaagacagagaagagccagatggatcgcaaaatcaaccagctttcggaggagaatggagacctttcctttaagctgcgggagtttgccagtcatctgcagcagctacaggatgccctcaatgagctgacggaggagcacagcaaggccactcaggagtggctagagaagcaggcccagctggagaaggagctcagcgcagccctgcaggacaagaaatgccttgaagagaagaacgaaatccttcagggaaaactttcacagctggaagaacacttgtcccagctgcaggataacccaccccaggagaagggcgaggtgctgggtgatgtcttgcagctggaaaccttgaagcaagaggcagccactcttgctgcaaacaacacacagctccaagccagggtagagatgctggagactgagcgaggccagcaggaagccaagctgcttgctgagcggggccacttcgaagaagaaaagcagcagctgtctagcctgatcactgacctgcagagctccatctccaacctcagccaggccaaggaagagctggagcaggcctcccaggctcatggggcccggttgactgcccaggtggcctctctgacctctgagctcaccacactcaatgccaccatccagcaacaggatcaagaactggctggcctgaagcagcaggccaaagagaagcaggcccagctagcacagaccctccaacagcaagaacaggcctcccagggcctccgccaccaggtggagcagctaagcagtagcctgaagcagaaggagcagcagttgaaggaggtagcggagaagcaggaggcaactaggcaggaccatgcccagcaactggccactgctgcagaggagcgagaggcctccttaagggagcgggatgcggctctcaagcagctggaggcactggagaaggagaaggctgccaagctggagattctgcagcagcaacttcaggtggctaatgaagcccgggacagtgcccagacctcagtgacacaggcccagcgggagaaggcagagctgagccggaaggtggaggaactccaggcctgtgttgagacagcccgccaggaacagcatgaggcccaggcccaggttgcagagctagagttgcagctgcggtctgagcagcaaaaagcaactgagaaagaaagggtggcccaggagaaggaccagctccaggagcagctccaggccctcaaagagtccttgaaggtcaccaagggcagccttgaagaggagaagcgcagggctgcagatgccctggaagagcagcagcgttgtatctctgagctgaaggcagagacccgaagcctggtggagcagcataagcgggaacgaaaggagctggaagaagagagggctgggcgcaaggggctggaggctcgattacagcagcttggggaggcccatcaggctgagactgaagtcctgcggcgggagctggcagaggccatggctgcccagcacacagctgagagtgagtgtgagcagctcgtcaaagaagtagctgcctggcgtgagcggtatgaggatagccagcaagaggaggcacagtatggcgccatgttccaggaacagctgatgactttgaaggaggaatgtgagaaggcccgccaggagctgcaggaggcaaaggagaaggtggcaggcatagaatcccacagcgagctccagataagccggcagcagaacgaactagctgagctccatgccaacctggccagagcactccagcaggtccaagagaaggaagtcagggcccagaagcttgcagatgacctctccactctgcaggaaaagatggctgccaccagcaaagaggtggcccgcttggagaccttggtgcgcaaggcaggtgagcagcaggaaacagcctcccgggagttagtcaaggagcctgcgagggcaggagacagacagcccgagtggctggaagagcaacagggacgccagttctgcagcacacaggcagcgctgcaggctatggagcgggaggcagagcagatgggcaatgagctggaacggctgcgggccgcgctgatggagagccaggggcagcagcaggaggagcgtgggcagcaggaaagggaggtggcgcggctgacccaggagcggggccgtgcccaggctgaccttgccctggagaaggcggccagagcagagcttgagatgcggctgcagaacgccctcaacgagcagcgtgtggagttcgctaccctgcaagaggcactggctcatgccctgacggaaaaggaaggcaaggaccaggagttggccaagcttcgtggtctggaggcagcccagataaaagagctggaggaacttcggcaaaccgtgaagcaactgaaggaacagctggctaagaaagaaaaggagcacgcatctggctcaggagcccaatctgaggctgctggcaggacagagccaacaggccccaagctggaggcactgcgggcagaggtgagcaagctggaacagcaatgccagaagcagcaggagcaggctgacagcctggaacgcagcctcgaggctgagcgggcctcccgggctgagcgggacagtgctctggagactctgcagggccagttagaggagaaggcccaggagctagggcacagtcagagtgccttagcctcggcccaacgggagttggctgccttccgcaccaaggtacaagaccacagcaaggctgaagatgagtggaaggcccaggtggcccggggccggcaagaggctgagaggaaaaatagcctcatcagcagcttggaggaggaggtgtccatcctgaatcgccaggtcctggagaaggagggggagagcaaggagttgaagcggctggtgatggccgagtcagagaagagccagaagctggaggagaggctgcgcctgctgcaggcagagacagccagcaacagtgccagagctgcagaacgcagctctgctctgcgggaggaggtgcagagcctccgggaggaggctgagaaacagcgggtggcttcagagaacctgcggcaggagctgacctcacaggctgagcgtgcggaggagctgggccaagaattgaaggcgtggcaggagaagttcttccagaaagagcaggccctctccaccctgcagctcgagcacaccagcacacaggccctggtgagtgagctgctgccagctaagcacctctgccagcagctgcaggccgagcaggccgctgccgagaaacgccaccgtgaggagctggagcagagcaagcaggccgctgggggactgcgggcagagctgctgcgggcccagcgggagcttggggagctgattcctctgcggcagaaggtggcagagcaggagcgaacagctcagcagctgcgggcagagaaggccagctatgcagagcagctgagcatgctgaagaaggcgcatggcctgctggcagaggagaaccgggggctgggtgagcgggccaaccttggccggcagtttctggaagtggagttggaccaggcccgggagaagtatgtccaagagttggcagccgtacgtgctgatgctgagacccgtctggctgaggtgcagcgagaagcacagagcactgcccgggagctggaggtgatgactgccaagtatgagggtgccaaggtcaaggtcctggaggagaggcagcggttccaggaagagaggcagaaactcactgcccaggtggagcagctagaggtatttcagagagagcaaactaagcaggtggaagaactgagtaagaaactggctgactctgaccaagccagcaaggtgcagcagcagaagctgaaggctgtccaggctcagggaggcgagagccagcaggaggcccagcgcctccaggcccagctgaatgaactgcaagcccagttgagccagaaggagcaggcagctgagcactataagctgcagatggagaaagccaaaacacattatgatgccaagaagcagcagaaccaagagctgcaggagcagctgcggagcctggagcagctgcagaaggaaaacaaagagctgcgagctgaagctgaacggctgggccatgagctacagcaggctgggctgaagaccaaggaggctgaacagacctgccgccaccttactgcccaggtgcgcagcctggaggcacaggttgcccatgcagaccagcagcttcgagacctgggcaaattccaggtggcaactgatgctttaaagagccgtgagccccaggctaagccccagctggacttgagtattgacagcctggatctgagctgcgaggaggggaccccactcagtatcaccagcaagctgcctcgtacccagccagacggcaccagcgtccctggagaaccagcctcacctatctcccagcgcctgccccccaaggtagaatccctggagagtctctacttcactcccatccctgctcggagtcaggcccccctggagagcagcctggactccctgggagacgtcttcctggactcgggtcgtaagacccgctccgctcgtcggcgcaccacgcagatcatcaacatcaccatgaccaagaagctagatgtggaagagccagacagcgccaactcatcgttctacagcacgcggtctgctcctgcttcccaggctagcctgcgagccacctcctctactcagtctctagctcgcctgggttctcccgattatggcaactcagccctgctcagcttgcctggctaccgccccaccactcgcagttctgctcgtcgttcccaggccggggtgtccagtggggcccctccaggaaggaacagcttctacatgggcacttgccaggatgagcctgagcagctggatgactggaaccgcattgcagagctgcagcagcgcaatcgagtgtgccccccacatctgaagacctgctatcccctggagtccaggccttccctgagcctgggcaccatcacagatgaggagatgaaaactggagacccccaagagaccctgcgccgagccagcatgcagccaatccagatagccgagggcactggcatcaccacccggcagcagcgcaaacgggtctccctagagccccaccagggccctggaactcctgagtctaagaaggccaccagctgtttcccacgccccatgactccccgagaccgacatgaagggcgcaaacagagcactactgaggcccagaagaaagcagctccagcttctactaaacaggctgaccggcgccagtcgatggccttcagcatcctcaacacacccaagaagctagggaacagccttctgcggcggggagcctcaaagaaggccctgtccaaggcttcccccaacactcgcagtggaacccgccgttctccgcgcattgccaccaccacagccagcgccgccactgctgccgccattggtgccacccctcgagccaagggcaaggcaaagcactaaagggccagtaccagtgagtggccccacctgtgtccccgatgctgacctcacctggtcctccgcctactgtccctctcagtgccttctctcagctcccaggccaacagtagccaaacccctagagacagtgatgcctgcccgcaccctggcctggtccctggtccttcactggcgccttctcggagctggcccagggggcctggagcatggacagtgtgggcgctctccctaccttgcctccttttttcttaaagcaaagtcacttctccatcacaaccagatttgaggctggttttgatggctgggtccttgggcctggccagtcttcctcttagcctctggatctagaagggaccataagaggagtaggccctggttcctgctgtcctggtggctgggcccagcaggggccctcactcttgaagtccaggactgggtctgacctggtgggagcacctgccagaggatgctctttcccaggacggatgggccctatgtctcaggagtggggttgggggacagccttcagcagcagctcacaccctaccttccccagacttgcactggggtgggatttggagtgatgggaaggtttttaagggccggggatggatcttttctaaatgttattacttgtaaataaagtctatttttctcccgtg

SEQ ID NO: 444 - DNA, 2358 bp, Homo Sapiens
ttttttttttttttttgcttaaaaaaaagccatgacggctctcccacaattcatcttccctgcgccatctttgtattatttctaatttattttggatgtcaaaaggcactgatgaagatattttctctggagtctccttctttctaacccggctctcccgatgtgaaccgagccgtcgtccgcccgccgccgccgccgccgccgccgccgcccgccccgcagcccaccatgtctcgccgcaagcaaggcaaaccccagcacttaagcaaacgggaattctcgcccgagcctcttgaagccattcttacagatgatgaaccagaccacggcccgttgggagctccagaaggggatcatgacctcctcacctgtgggcagtgccagatgaacttcccattgggggacattcttatttttatcgagcacaaacggaaacaatgcaatggcagcctctgcttagaaaaagctgtggataagccaccttccccttcaccaatcgagatgaaaaaagcatccaatcccgtggaggttggcatccaggtcacgccagaggatgacgattgtttatcaacgtcatctagaggaatttgccccaaacaggaacacatagcagataaacttctgcactggaggggcctctcctcccctcgttctgcacatggagctctaatccccacgcctgggatgagtgcagaatatgccccgcagggtatttgtaaagatgagcccagcagctacacatgtacaacttgcaaacagccattcaccagtgcatggtttctcttgcaacacgcacagaacactcatggattaagaatctacttagaaagcgaacacggaagtcccctgaccccgcgggttcttcacacacccccattcggcgtagtacccagagagctcaagatgtgtggcagttttcggatggaagctcgagagcccttaagttctgagaaaatttgaagcccccaggggtggggtggacgcgtgccgcccagtcgacgtcagcgtggtctgtcatcctgctagtttgtgatgttttctgacagtagcctccaagaagccgttgtgcgaagacagagtcctgcagagtccttccagcctaggcctgcagcgccattttatttatattttttaataaaaagtaaaaacaaaaaaacagacccacattggaacagtgaatcagtcccatagagagggcccgtggaccatcgctgtcatgagtgatgccctggcccttctgaaaccagccaacctaattacctgtattgtggaaatgcgcatgagtccccaaccccttgtttctatacattctatgttgtcttttaaaaagtgtgcttaacattgacacaataaatgttggagctttaggtggtgtttgcttgttctttaatttttaatgcttataagacaatgaggctgcttatgattttgtacttctgtacctgtttcctacagacacccatcgggtgggtaggaggaacagatttgagaaatgggcaggagatgtaggaggggaactaggttaccgcttatcagatggcataaattttcaaggagaatcaaaatgcaaaacttgggaataaatcatagcaatatcataattaatgtagtagtaatattgctgtttattaatgctgaagtgtggttttcctaactgtctgacttataatttgcataccattaaataatgcataatatggcacgccgaatcctgtttttcaaatatatgcttttggtggctaccatgcaggatttgaatttgtcttttaatttagcttaggaaagaacatcactgggcgagcggtaaatcctaaagaaggtgataaatgtcagtagtttcttattaaatattctaattttaggttcccaaaccttcaggaaatatatcttaatgcagacaaacaaacataaaacttctttagtacttacatcaggaaatttggggcagattttagaggggggaaattataggaggaaagaagttcacatcagaacagacaatcacagcaatgctctattccttagaaattagtgccacaaataagttacatctacaaacaggtggtaaaaattctttctggcccagttaatttgcacagaacttttctcagtttggtattttttactgcttggagatccagaagagaattagaaacaacatagcaaattaaaataggtttgtcaataatagagctcagacacctgtgtgctgtagattcacatacaggccgtgaacctaagtggggaaaatcctacctatccaccttctggctagattacctagcttagtgaaaagatagccaaataattggcatgtgaattatttcctgcttattcataataaataatgactgtcta

SEQ ID NO: 445 - DNA, 1679 bp, Homo Sapiens
gtcgggaggagggcagacacgccgctttttggatgcctcctatgcctggcgggagtcttgtctgagctggcaccaccacacggcccacgacatcttcgcagggaagcctgtggaccctctgccaggctccacaagaggtcaggacagtgcagtgtgttcacaaggccagtttctgatcgtccgccccgaggctgaggaccagtaggcagctcccaagatgggtgaaaggaaaggggtcaacaagtactatcctccagacttcaaccctgagaagcatggctctctcaaccgataccacaacagccacccgcttcgggagcgggctcggaagctgtcacagggcatcctcatcatccgattcgaaatgccatataacatctggtgcgatggctgcaagaaccacatcggcatgggtgttcgttacaatgcagaaaagaagaaggtgggcaattactacacaaccccgatctacaggttccggatgaaatgccacctctgtgtcaactacatcgagatgcagacggaccccgccaactgcgactacgtgatcgtgagtggcgcccagcgcaaggaggagcgctgggacatggcggacaatgagcaggtgctgaccacagagcatgagaagaagcagaagctggagacggacgccatgttccggctggagcatggcgaggccgaccgcagcacactcaagaaggcgctgcccacactgagccacatccaggaggcccagagcgcctggaaggacgacttcgccctcaacagcatgctgcggagaaggttccgggaaaagaaaaaagccatccaggaggaggaggagagagaccaggccttgcaggccaaggcgagcctgaccatcccgctggtgcccgagacggaagatgaccgcaagctggcggctctgctgaagttccacaccctggactcctacgaggacaagcagaaactcaagcggaccgagatcatcagccgctcctggttcccctctgcccccggatccgcctccagcagcaaggtcagcggcgtcctgaagaagctggcacagagccgcagaaccgcgcttgccacctcccccatcaccgtcggggacctgggcatcgtgcggcggaggtctcgggacgtcccggagagcccccagcatgcggccgacacccccaagtctggggaaccgcgggtaccagaggaggctgcccaggaccggcccatgtcccccggagactgtcctccggaaacaactgagacccccaagtgcagcagcccgagggggcaggaagggagccgtcaggacaagcccctgtcgccagcaggctcctcccaggaggcagctgacacccccgacacgcggcacccctgcagtctcggctcctccctcgtggcggactactccgactcggagagtgagtgagcgatccccatcctggagactggacccgctctagaggcccggacacacccaggaggcccctcacagactgcagacccccggctcgcccaccagccctgggagagctcagatgccgcatcctccccagaccgcgccttcctgcaaccgtggagttatttatttggtcctggtgagggtgtttgtgccttgtgagactccgtacattaaagacctgtctcttcttcaaaaaaaaaaaaaaaaaaaaaaaaaaaaaaaaaaaaaaaaaaaaaaa

SEQ ID NO: 446 - DNA, 3192 bp, Homo Sapiens
cgccagagtccggagcagccgccgcccgaccgcgccgagctcagttcgctgtccgcgccggctcccaccccggcccgaccccgacccggcccggtcaggccccatactcagtagccacgatggaggtgatgaacctgatggagcagcctatcaaggtgactgagtggcagcagacatacacctacgactcgggtatccactcgggcgccaacacctgcgtgccctccgtcagcagcaagggcatcatggaggaggatgaggcctgcgggcgccagtacacgctcaagaaaaccaccacttacacccagggggtgccccccagccaaggtgacctggagtaccagatgtccacaacagccagggccaaacgggtgcgggaggccatgtgccctggtgtgtcaggcgaggacagctcgcttctgctggccacccaggtggaggggcaggccaccaacctgcagcgactggccgagccgtcccagctgctcaagtcggccattgtgcatctcatcaactaccaggacgatgccgagctggccactcgcgccctgcccgagctcaccaaactgctcaacgacgaggacccggtggtggtgaccaaggcggccatgattgtgaaccagctgtcgaagaaggaggcgtcgcggcgggccctgatgggctcgccccagctggtggccgctgtcgtgcgtaccatgcagaataccagcgacctggacacagcccgctgcaccaccagcatcctgcacaacctctcccaccaccgggaggggctgctcgccatcttcaagtcgggtggcatccctgctctggtccgcatgctcagctcccctgtggagtcggtcctgttctatgccatcaccacgctgcacaacctgctcctgtaccaggagggcgccaagatggccgtgcgcctggccgacgggctgcaaaagatggtgcccctgctcaacaagaacaaccccaagttcctggccatcaccaccgactgcctgcagctcctggcctacggcaaccaggagagcaagctgatcatcctggccaatggtgggccccaggccctcgtgcagatcatgcgtaactacagttatgaaaagctgctctggaccaccagtcgtgtgctcaaggtgctatccgtgtgtcccagcaataagcctgccattgtggaggctggtgggatgcaggccctgggcaagcacctgaccagcaacagcccccgcctggtgcagaactgcctgtggaccctgcgcaacctctcagatgtggccaccaagcaggagggcctggagagtgtgctgaagattctggtgaatcagctgagtgtggatgacgtcaacgtcctcacctgtgccacgggcacactctccaacctgacatgcaacaacagcaagaacaagacgctggtgacacagaacagcggtgtggaggctctcatccatgccatcctgcgtgctggtgacaaggacgacatcacggagcctgccgtctgcgctctgcgccacctcactagccgccaccctgaggccgagatggcccagaactctgtgcgtctcaactatggcatcccagccatcgtgaagctgctcaaccagcccaaccagtggccactggtcaaggcaaccatcggcttgatcaggaatctggccctgtgcccagccaaccatgccccgctgcaggaggcagcggtcatcccccgcctcgtccaactgctggtgaaggcccaccaggatgcccagcgccacgtagctgcaggcacacagcagccctacacggatggtgtgaggatggaggagattgtggagggctgcaccggagcactgcacatcctcgcccgggaccccatgaaccgcatggagatcttccggctcaacaccattcccctgtttgtgcagctcctgtactcgtcggtggagaacatccagcgcgtggctgccggggtgctgtgtgagctggcccaggacaaggaggcggccgacgccattgatgcagagggggcctcggccccactcatggagttgctgcactcccgcaacgagggcactgccacctacgctgctgccgtcctgttccgcatctccgaggacaagaacccagactaccggaagcgcgtgtccgtggagctcaccaactccctcttcaagcatgacccggctgcctgggaggctgcccagagcatgattcccatcaatgagccctatggagatgacatggatgccacctaccgccccatgtactccagcgatgtgccccttgacccgctggagatgcacatggacatggatggagactaccccatcgacacctacagcgacggcctcaggcccccgtaccccactgcagaccacatgctggcctaggcggcctggccccagtgcggttcctcatctgagaggctctccgtgcaggcgatggggcaagacagaaaagtgcctgagctggggaagccggggtgtaacttcctgctgcaccctgcgcctccagaggtcctccgtagggtctttcttgggatagtgttctgctcctgcttttctgtcctgggcatgggtccagggcctgacaccccctccccgcccctgtggccctggccactaaagcttcagactcaagtacccattctgttttcccccagcaacgcccctccaaacctccagcctccctgtctccagctgcctgggcccggaagggctttggttccttctctgggtctgattttctcactgaactccaccgaccaactgccctaagcccccagggcctccagggcccaggttcgagacccaaacccccaaaatccaaaacttctcttgaaaagttcagggaccgtccaggggagatggggaggagatatggagtgagtcacctgctccagaagatgccagcttctctctccagggtgcttagttggctttgcccacccctcactccccagggagctccggggacagcttcctcacacccctgtcccacccacacagctgccctagctgaccccgagaagtgctcttggctgacccctctggtgtgtggtgaggggctttctcttccccttcctgtttcagacccccccatttcccgcacatggtgtggggggctgggggaggtccaagcagagtgttttattattatcgctttatgtttttggttattggtttttttgtatagaccaaagcaaagaaaataaaaataacacag

SEQ ID NO: 447 - DNA, 2559 bp, Homo Sapiens
gcgggccgaggagccgggcgcaatggagcggaagaggtgggagtgcccggcgctcccgcagggctgggagagggaagaagtgcccagaaggtcggggctgtcggccggccacagggatgtcttttactatagcccgagcgggaagaagttccgcagcaagccgcagctggcgcgctacctgggcggctccatggacctgagcaccttcgacttccgcacgggcaagatgctgatgagcaagatgaacaagagccgccagcgcgtgcgctacgactcctccaaccaggtcaagggcaagcccgacctgaacacggcgctgcccgtgcgccagacggcgtccatcttcaagcagccggtgaccaagattaccaaccaccccagcaacaaggtcaagagcgacccgcagaaggcggtggaccagccgcgccagctcttctgggagaagaagctgagcggcctgaacgccttcgacattgctgaggagctggtcaagaccatggacctccccaagggcctgcagggggtgggacctggctgcacggatgagacgctgctgtcggccatcgccagcgccctgcacactagcaccatgcccatcacgggacagctctcggccgccgtggagaagaaccccggcgtatggctcaacaccacgcagcccctgtgcaaagccttcatggtgaccgacgaggacatcaggaagcaggaagagctggtgcagcaggtgcggaagcggctggaggaggcgctgatggccgacatgctggcgcacgtggaggagctggcccgtgacggggaggcgccgctggacaaggcctgcgctgaggacgacgacgaggaagacgaggaggaggaggaggaggagcccgacccggacccggagatggagcacgtctagggcaggtgctgcggggccacgggggctccctggagtcgggtcctggcagtggggactgcctggtgaacacagatgtgcttgggatgacgggtgcctcccaagagcttcccatctccctagaagagcccaagcgtccccgtcccgtggagtcgctaaagccagccctccctgtcctttccagaggccctgccgagagcccgtgctgcctgctggagccgcctgcagacgcggtcctcggccccacgtgaaccaggctcggcggcgaagcccagccttggagacacccaggaggaaggccgtgctcctggctccctcctcggcccgtccccacttcccggggcctcggggcacacagctggggctgcccccacccgaaagaccctccacgctcgtcctctacagagtccggcttcgggaagtgccgggtgctcctgggccctgcctggctccctacgacctttgggctcgaggccagctcctccccatgcccgctgtcccagctccttgagactggagagcagccagcaggtgcccggcagctcggcgccacggcttgctgacagctgggagggtttctcggtctggaggcgtagttttgaaactcacatcacccactgtgcagcgtgaggacgggactctggtctgctgtggggggcatgcaggacggcgccactctctgccctgccatgcggctggtggtgccacagagcctcaccgtgcctgagtggcatgcccaggaggccgctctccttcagtaaatgtaacacagtcgaggcacgtcatcgggcagccttccctgtgtgccaacgccagccttcgcttctgaaaaccaaactccagccgctgccagtcgggacttggtcgcccggcgctgccagaatgctccactgccagccggcccccctgcctcggtttcccttctgtttagtggcgacacaggcacccagctttggggtggtgctgacgctcccaggggtgccaggagccactgggacagggtgaggctcccagacgctcctcgaggtgcccagctctccagggagcttctggcccaaggccgtctgagggatctgctccttaaccccccagtgccttggcgagggcaggttccaagccacagacgcctgccccgagtggactctgcggccagtccctggtgccctcctggccctgctgcccagtgagggctcctacgggtgggttcattggcctgggcccagcgagcccccacctgcattgaccttaggcccatagagagggcctgtcccggtgctgccccagccaggatctggtcgctgccccagggggactgatgggcagagtcgcccctgtggctggactgtgaccatccctgatggggcctgaccgcgggagctgaggaagcgccgctccaccgtctgccctccaaggacccgcatggaggcagtgggctggcagcttcctgctgctccctgtcagagtcaaagcacaaatcctcaggacgggctcaagggccagggcagccgagggaagctccaggtggggaccacgtcttcctgaggttggtgcccactggctgggaccctttgcagtggggtggcctcccctctgtctgcctggtggagggagccgtgggcgtggggacgtgactgaataaagccaccatgggtggatgtgcttgg

SEQ ID NO: 448 - DNA, 1101 bp, Homo Sapiens
ccggaagtgctgcgagccctgggccacgctggccgtgctggcagtgggccgcctcgatccctctgcagtctttcccttgaggctccaagaccagcaggtgaggcctcgcggcgctgaaaccgtgaggcccggaccacaggctccagatggaccctgggaaggacaaagagggggtgccccagccctcagggccgccagcaaggaagaaatttgtgatacccctcgacgaggatgaggtccctcctggagtggccaagcccttattccgatctacacagagccttcccactgtggacacctcggcccaggcggcccctcagacctacgccgaatatgccatctcacagcctctggaaggggctggggccacgtgccccacagggtcagagcccctggcaggagagacgcccaaccaggccctgaaacccggggcaaaatccaacagcatcattgtgagccctcggcagaggggcaatcccgtactgaagttcgtgcgcaatgtgccctgggaatttggcgacgtaattcccgactatgtgctgggccagagcacctgtgccctgttcctcagcctccgctaccacaacctgcacccagactacatccatgggcggctgcagagcctggggaagaacttcgccttgcgggtcctgcttgtccaggtggatgtgaaagatccccagcaggccctcaaggagctggctaagatgtgtatcctggccgactgcacattgatcctcgcctggagccccgaggaagctgggcggtacctggagacctacaaggcctatgagcagaaaccagcggacctcctgatggagaagctagagcaggacttcgtctcccgggtgactgaatgtctgaccaccgtgaagtcagtcaacaaaacggacagtcagaccctcctgaccacatttggatctctggaacagctcatcgccgcatcaagagaagatctggccttatgcccaggcctgggccctcagaaagcccggaggctgtttgatgtcctgcacgagcccttcttgaaagtaccctgatgaccccagctgccaaggaaacccccagtgtaataataaatcgtcctcccaggccaggctc

SEQ ID NO: 449 - DNA, 1929 bp, Homo Sapiens
gaggcgatcttggaggacgaagaggaggagaaagtggcgcagcccgctggggcatcggctgatttgaacaccagcttttctggggtggatgaacatgcaccgataagctatgaggactttgtgaactttcctgatattcaccactctaatgaggagtatttcaagaaagtagaagagttgaaggctgcccacatagaaactatggcaaaattagagaaaatgtaccaggataaattacatttaaaggaagttcagccagtggtcatcagagaagactctcttagtgactcttccagatctgtatcagaaaagaactcctatcaccctgtctcattaatgacatcattttcagagcctgatttaggccagtcttcctccttgtatgtgtcctcctctgaagaggagttacccaacctagaaaaagagtatcctaggaaaaacagaatgatgacctatgctaaggagctcatcaacaatatgtggacagacttttgtgttgaggattatattcgctgtaaagatactggcttccatgcagctgaaaaaagaaggaagaaacgaaaagaatgggtgcccacaattacagtaccggagccttttcaaatgatgataagagaacagaagaaaaaagaagagtccatgaaatctaaatcagatatcgaaatggtacataaagcgctcaaaaaacaagaagaggatccagagtataagaagaaattccgagccaatccagttcctgcatctgtctttctccccctttaccatgatttagtcaagcaaaaagaagaacggagaaggtctctgaaggagaaaagcaaagaagctcttttggcctcacaaaagccatttaaatttatagcaagggaggaacagaagcgagcagcccgggaaaagcagctgagagactttcttaagtataaaaagaaaacaaatcgatttaaagccagacccattcctcgatctacttatggttcaactaccaatgacaagttaaaagaagaagagctctatcgaaaccttaggacacagctgagagcccaggagcatttacagaactcatctcctctgccttgtaggtcagcttgcggatgcaggaaccccaggtgtcctgaacaggctgtaaagttgaagtgtaaacacaaggttaggtgcccaactcctgattttgaggaccttcctgagagataccagaaacacctctcagaacacaagtctccaaaactcttaacagtgtgtaaaccatttgatcttcatgcatctccacatgcatctattaaaagagaaaaaattttggcagacatcgaagcagatgaagaaaatttaaaagaaacacgttggccttatttgtctccaaggcgtaagtcaccagtaagatgtgcaggtgtaaaccctgtgccttgtaactgcaaccctcccgtgcccacggtatcttccagaggacgagaacaagccgtaagaaagagcgaaaaggaaaggatgagagaataccaacgagaactagaagaaagagaagaaaaattaaaaaagaggccactgctatttgaaagagttgctcagaaaaatgcaagaatggcagcagaaaagcattattctaataccctaaaagcactaggaatatctgatgagtttgtttcaaagaaaggccaaagtggaaaagtacttgagtacttcaacaatcaagagacgaaaagtgtcactgaagacaaagaaagctttaatgaagaagaaaaaatagaagaaagagagaatggggaagaaaattattttattgataccaacagccaggattcttacaaggaaaaagatgaagccaatgaggaaagtgaagaagagaaatctgttgaagaatcacactgaatcatcaaggtctcctctctatgcccttgctgttgtttgcagcgtcagggtgtcagcagccgcatttgtgtt

SEQ ID NO: 450 - DNA, 4260 bp, Homo Sapiens
gtgcagttgagtcgcgagtacggctgagctgcgtaccggcctccctggctctcacactccctctctgctcccgctctcctaatctcctctggcatgcggtcagccccctgcccagggaccacaggagagttcttgtaaggactgttagtccctgcttacctgaaagccaagcgctctagcagagctttaaagttggagccgccaccctccctaccgccccatgccccttcaccccactccgaaattcaccgacctttgcatgcactgcctaaggatttcagagtgaggcaaagcagtcggcaaatctaccctggcttttcgtataaaaatcctctcgtctaggtaccctggctcactgaagactctgcagatatacccttataagagggagggtgggggagggaaaagaacgagagagggaggaaagaatgaaaaggagaggatgccaggaggtccgtgcttctgccaagagtcccaattagatgcgacggcttcagcctggtcaaggtgaaggaaagttgcttccgcgcctaggaagtgggtttgcctgataagagaaggaggaggggactcggctgggaagagctcccctcccctccgcggaagaccactgggtcccctctttccccaacctcctccctctcttctactccacccctccgttttcccactccccactgactcggatgcctggatgttctgccaccgggcagtggtccagcgtgcagccgggagggggcaggggcagggggcactgtgacaggaagctgcgcgcacaagttggccatttcgagggcaaaataagttctcccttggatttggaaaggacaaagccagtaagctacctcttttgtgtcggatgaggaggaccaaccatgagccagagcccgggtgcaggctcaccgccgccgctgccaccgcggtcagctccagttcctgccaggagttgtcggtgcgaggaattttgtgacaggctctgttagtctgttcctcccttatttgaaggacaggccaaagatccagtttggaaatgagagaggactagcatgacacattggctccaccattgatatctcccagaggtacagaaacaggattcatgaagatgttgacaagactgcaagttcttaccttagctttgttttcaaagggatttttactctctttaggggaccataactttctaaggagagagattaaaatagaaggtgaccttgttttagggggcctgtttcctattaacgaaaaaggcactggaactgaagaatgtgggcgaatcaatgaagaccgagggattcaacgcctggaagccatgttgtttgctattgatgaaatcaacaaagatgattacttgctaccaggagtgaagttgggtgttcacattttggatacatgttcaagggatacctatgcattggagcaatcactggagtttgtcagggcatctttgacaaaagtggatgaagctgagtatatgtgtcctgatggatcctatgccattcaagaaaacatcccacttctcattgcaggggtcattggtggctcttatagcagtgtttccatacaggtggcaaacctgctgcggctcttccagatccctcagatcagctacgcatccaccagcgccaaactcagtgataagtcgcgctatgattactttgccaggaccgtgccccccgacttctaccaggccaaagccatggctgagatcttgcgcttcttcaactggacctacgtgtccacagtagcctccgagggtgattacggggagacagggatcgaggccttcgagcaggaagcccgcctgcgcaacatctgcatcgctacggcggagaaggtgggccgctccaacatccgcaagtcctacgacagcgtgatccgagaactgttgcagaagcccaacgcgcgcgtcgtggtcctcttcatgcgcagcgacgactcgcgggagctcattgcagccgccagccgcgccaatgcctccttcacctgggtggccagcgacggctggggcgcgcaggagagcatcatcaagggcagcgagcatgtggcctacggcgccatcaccctggagctggcctcccagcctgtccgccagttcgaccgctacttccagagcctcaacccctacaacaaccaccgcaacccctggttccgggacttctgggagcaaaagtttcagtgcagcctccagaacaaacgcaaccacaggcgcgtctgcgacaagcacctggccatcgacagcagcaactacgagcaagagtccaagatcatgtttgtggtgaacgcggtgtatgccatggcccacgctttgcacaaaatgcagcgcaccctctgtcccaacactaccaagctttgtgatgctatgaagatcctggatgggaagaagttgtacaaggattacttgctgaaaatcaacttcacggctccattcaacccaaataaagatgcagatagcatagtcaagtttgacacttttggagatggaatggggcgatacaacgtgttcaatttccaaaatgtaggtggaaagtattcctacttgaaagttggtcactgggcagaaaccttatcgctagatgtcaactctatccactggtcccggaactcagtccccacttcccagtgcagcgacccctgtgcccccaatgaaatgaagaatatgcaaccaggggatgtctgctgctggatttgcatcccctgtgaaccctacgaatacctggctgatgagtttacctgtatggattgtgggtctggacagtggcccactgcagacctaactggatgctatgaccttcctgaggactacatcaggtgggaagacgcctgggccattggcccagtcaccattgcctgtctgggttttatgtgtacatgcatggttgtaactgtttttatcaagcacaacaacacacccttggtcaaagcatcgggccgagaactctgctacatcttattgtttggggttggcctgtcatactgcatgacattcttcttcattgccaagccatcaccagtcatctgtgcattgcgccgactcgggctggggagttccttcgctatctgttactcagccctgctgaccaagacaaactgcattgcccgcatcttcgatggggtcaagaatggcgctcagaggccaaaattcatcagccccagttctcaggttttcatctgcctgggtctgatcctggtgcaaattgtgatggtgtctgtgtggctcatcctggaggccccaggcaccaggaggtatacccttgcagagaagcgggaaacagtcatcctaaaatgcaatgtcaaagattccagcatgttgatctctcttacctacgatgtgatcctggtgatcttatgcactgtgtacgccttcaaaacgcggaagtgcccagaaaatttcaacgaagctaagttcataggttttaccatgtacaccacgtgcatcatctggttggccttcctccctatattttatgtgacatcaagtgactacagagtgcagacgacaaccatgtgcatctctgtcagcctgagtggctttgtggtcttgggctgtttgtttgcacccaaggttcacatcatcctgtttcaaccccagaagaatgttgtcacacacagactgcacctcaacaggttcagtgtcagtggaactgggaccacatactctcagtcctctgcaagcacgtatgtgccaacggtgtgcaatgggcgggaagtcctcgactccaccacctcatctctgtgattgtgaattgcagttcagttcttgtgtttttagactgttagacaaaagtgctcacgtgcagctccagaatatggaaacagagcaaaagaacaaccctagtacctttttttagaaacagtacgataaattatttttgaggactgtatatagtgatgtgctagaactttctaggctgagtctagtgcccctattattaacaattcccccagaacatggaaataaccattgtttacagagctgagcattggtgacagggtctgacatggtcagtctactaaaaaacaaaaaaaaaaaacaaaaaaaaaaaaacaaaagaaaaaaataaaaatacggtggcaatattatgtaaccttttttcctatgaagttttttgtaggtccttgttgtaactaatttaggatgagtttctatgttgtatattaaagttacattatgtgtaacagattgattttctcagcacaaaataaaaagcatctgtattaatgtaaagatactgagaataaaaccttcaaggttttcca

SEQ ID NO: 451 - DNA, 1127 bp, Homo Sapiens
gcagatcggcttccggttccggtgggctctgaaccctgaaaggctcgcgatgcctctacacaagtatcccgtgtggctctggaagcggctgcagctgcgggagggcatctgttcccgcctgcccggccactacctgcgctccctggaggaggagcggacgcccactcccgtgcactataggcctcatggggccaagttcaagatcaaccccaagaacgggcagcgggagcgtgtggaggacgtgcccattcccatctactttccccccgaatcccagcgggggttgtggggcggcgagggctggatcctgggccaaatatatgccaacaacgacaagctctccaagaggctgaagaaagtgtggaagccacagctgtttgagcgagagttctacagtgagatcctggacaagaagttcacagtgactgtgaccatgcggaccctggacctcatcgatgaggcttatgggctcgacttttacatcctcaagaccccgaaggaggacctgtgctccaagtttgggatggacctgaagcgagggatgctgctgcggcttgcccggcaggacccccagctgcaccccgaggaccccgagcggcgggcagccatctacgacaagtacaaggaatttgccatcccagaggaggaggcagagtgggtgggcctcacgctggaggaggccattgagaagcagagacttttggaggagaaggaccctgtacccctgttcaagatctatgtggcggagctgatccagcagctgcagcagcaggcactgtcagagccggcggtggtgcagaagagagccagtggccagtgaccacacagctcctccatgcctgaccaacaggcccagctttccctgccaggccctttgcactgaggacacagatcccggggagctgtgagggccaccggtgggcagtgggtggatcctggtttcgtgtgctgcccatgcaccttccagcccggggccagcttggcagggatccccaggaggcctgggccgcccagaggctcctctcaggctgggccccgacgtttgcggcagtgttccttgtgcccgtggggccgggagcgagtaaagtctgggccaggcaaaaaaaaaaaaaaaaaaaaaaaaaaaa

SEQ ID NO: 452 - DNA, 3274 bp, Homo Sapiens
gtcatgcgtgccacgctctcctctacgcgccggaccctgggatgctcttcggccgcatcccgctgcgctacgccatactgatgcagatgcgcttcgatggacgcctgggcttccccggcggattcgtggacacgcaggacagaagcctagaggacgggctgaaccgcgagctgcgcgaggaactgggcgaagcggctgccgctttccgcgtggagcgcactgactaccgcagctcccacgtcgggtcagggccacgcgttgtggcccacttctatgccaagcgtctgacgctcgaggagctgttggctgtggaggccggcgcaacacgcgccaaggaccacgggctggaggtgctgggcctggtgcgagtgcccctgtataccctgcgggatggtgtaggaggcctgcctaccttcctggagaattcctttattggctctgcgcgggagcagttacttgaagctctccaggacttgggactgctgcagtctggctctatttcaggccttaagattccagctcatcactagaggcagccctccatggacccatgaaaactgagatgaggaccttggtactagggagggagggaaggacgtgggaatgttttcttattggatctgagagatgatacatgataccagatgaaaagaaggagaagtgtgtaccatatgttttgagcagaggaccctccaacttatggcatcaggggcaaaaagtcacagcttatcccaggcaccctggcaggttctcagagcctgcctcctccctgtttatatgcgtacagcctggtaacccccaggcatgcaaatatacaatctgtaacaacacacagcctgacaccttcccctggtcatgtccagtttaaccttgaagtggcatttgtcacactaccctggtccctgattgcaaggagcttctgaagcaagggtgaatccttcccacactcctccatggttgccctccaaggtctagcccagcctatttgttagggaggatagagaaacagagcaccccctgtgctttctgaaaatagacttgctcttgtcttgagtggtgaccaaagcagttggctcttaaaaggtgggagagcagcccaaccaatccccaatccttttcttctgaaactgagcaggaagggtaaggaagtggctaggtctccttggactgagcatggacatgagtcctgtgaggactggtgtctctcctctagagctttcatctttgggatgcctgagactccgagactatcagaagggaattgacccaccccagtctagcaccaccctgccttcacttcatctacataaaggtggtataaaaacatagactggaggaggtaatccatggagagagaaaaagaagagggctcaggacaaggccctgaggaggcccaatcctaaaagtttgggcagagggaaccaggcacgttaaagaagacagaaagcggactatgcagagtgcttgtgagggtttcactaaaacagaggcaaaactgtccattgaattcagtaacatgaagtgtttgatgactatgatggcagcagtttcaggaagggcggtatggaaggcaggctgtactggttgagtgaatggaaagttggggagtagaacgtgtgagaagttggccttcaaggggctcaggttaataatagagagctatggagtcaaggcatgtttaagatgggaggtagagcacgccaatattgatggcaacagtcaagatggtgtgatgagagagatgggaggggcacaaagaggaggacccctgaaggagcagagtccatgagaaagaaggagggatgggacctttgtaggaagagacacagtcctgcagcctcatatggctcaataaaacagaaaggggcaagtatagaagattaggatgtctaaattaatggggaaatgatgaaggagtttgaatctcttctttgtgaaatgaagtgagactatcagctagttgtgggtggagtgtgttctcagaaggtatgaagtagatgttttcctaggtgttggaaaacaggttgattaaggcaacagcagaagggcagggcaaggctgagctctgagatggtcagtttagagtaggatgctgggcactcaggtgtgtgtgtgttgagtggggctctgcacacacctgtcttcccctcatcaggattcaggagctgggatgggtacacttactgcagtgttggggttttgccagggaagtaaaaggagctgagagaaagatgggtcagttcagaagacatacacaggagaaattgtagtgatgaaatgtgcagtctaaggtttaatctgaccaagaaattggaattgaaaacaggaggtgactagggagggattaggaaattagaggtcttgacaagatagaaactccagcatggtgaggggttgggcagggaggtatatttgagccagacaggagtgctttggaaattgagaggtggagcaatctcaggtaaaggcaaaatagagggtatgacctggggttgctggccagagccagggaggagccttaagaagtgaaatctagggttggcgaggctggagggcagggtgagcctccacatgggtgctgaagcaagaaaccgacagatgttgaggagaatggtgtgacctaggagtcagcatccttggtgaacaagaggagtggccacaaggccagtggcacctgccagaggggaaagcaggcatgacaggatagcatctcccaggtgagagccttttgaggaagggagggtgggcagtggtctggaagcttgatgcagagcagtgtgggtcccactggcagcccttggtcttagaagaatgggagtacccagtgggggagcagctgtacaatgaggtagactcctagaggttaattatcatctcctaatcttaccctgacccttttgtcaaacgttatctagattaaacctcagtataggcaggctgcaggaaatggacattccagtggcccctggggttccagcctgtagcagcttcatctgtgctttgtgcacttggttctcagtcatctctgcaagggaccctgacgcctgggagatcagagccactgaccctttatggcactgctaacagaccccttccctcaggtaattctggatccagaactcattatgggatgtaatccaggtcaacactaataccacttggaaggttccgctctgtctcactctgcttgagtatcccactgatcagtctctcagcgcctgcctactgggcagctcatctgtccacttattcgtattaaatttgctttttattt
